United States Patent Application Publication US 2025/0235397 A1 - sequence listing, part 12

SEQ ID NO: 14 - DNA, 1700809 bp, Pediococcus pentosaceus
  source 1..1700809: mol_type = genomic DNA
tcgcacaagtagaaaaaaacaattaaaacatcttattttagaataaggtgtttttttgtatataaaaataattaagatcctaaagtaagtttgagcttcacttagagaacttttaattaatttcagtttaatatcccgataaattaagtaaagttaaataagtaccatttatttaacaaataataacgttttagtttacaaatgtattgaatagaactagaatgaaccttgtagaaaacttactaaaaagaagtggaatgatgggattatatgactgaaaaaattaatgcatctgatgcaatgattaaagttttggaatcatggggagttcataacgtttatggtctaccagggggatcttttgattcgacaatgaatgctttgtacaatcggaagagcaccattaattatgttcaagttcgacatgaagaagttggggctctggcagcggtcggagaagctaaggtaactggtaaacttggagttacatttggttcagctggacctggtgcagttcatttacttaatggtttatatgatgctaagcatgatcatatgcctgtattagctttggttggacaagttcctacaacattaatgaacacggactatttccaagaattaaatgaaaatccaattttcaccgatgttgcagtttataatcgaaccgtaatgactgctgaacaaatgccacacgtcgtcgacgaagctatccgccaagcttacaaatatagtggggtagcggtagttacaattcctaaggatttaggttggcaacccattgaagataactatgtctcatcagctaatctttatcaagcaccaatcttacctgaaccagatgtaaagcaggttgacgaagcgcttgaaattttgagtaatgccaagcatccagtgatgtacatcgggcaaggtacaagaggagctggatcagatattattgcattgtctgaaaaattgcatattccgattgttacatcagccttggctaagggaattgtccccgacagttataaggctaacatgggatcggctggtcgagtagcaactaaaccaggggtagaagttttacaatcagcagatgctgtaatgttcgtgggctctgattttccatttcagccttactttgttgccccagatgctaaatatatccaaatagatattgatgcaagtaaatttggtagaagacatgttgtagatttggctatcttagctgactcccataaattcctcaaggtgatgctagaaaaagctgaaactactgctgaaagcaaatggtataaggcagcattagaaaacaaaaagaattgggaagaatggaagaattcgtttgtgggccagcaagatacacccttaaatgttgaaaatgtttttgcgaagattaatgctttagcaaccgatgatgctattttccaagttgatgttggtaatgtaacgatcgatggcatgcgtttccttaaagctgatcaagctcaacgatttacgacttcaggttggtatgccacaatgggttatgccttaccagcagccattggagcacaagctgaatatccagatcgccaagtttggtcaatttcaggcgatggtggatatgccatggtaatgcaagatgtcctaactcaagttaagtatcatatgcctatcatcaatgttatattaacaaatgaaagcttaggctttatcgaagctgaacaagatgatagcaagcaaccacattctggtgtagatttgattgatacagattacggtacttcagcccaagcactgggggcagaaggatttgaagttcggacctacgacgaactggaacaagcctttgaaaaagcgaaagatcgtaaaggccccgtggtaattgatgttaagattacaaacttaagaccacttcctgttgaacagctacttttggataaagaaactcaagatcctgaagcagtcgaacaatttgttaagaagtatcatgctgaatcattgattcctttcagaaaattattagaagaagcataatttaaatactaaaaaacgggcgaaaaagtcaaagattgatttttcgtccgtttttatttgtttaagaaattaattgatggttataaaaaatgaagccaaaccaattagagcaattaggactagcaaagtgaagttccgaggtaggtgtaatttaggaataaaccaactaaaaactgctaaaatgggataaattaaagctgtccaactctttaaaagaataaaagcaaaaatcgtaatgattaaagttaatgctaaggcaaatattgcaaacttaaaactagttttaataaaaatagcaaagagaattatgataatcatcaaggataacaataagcccattttcaagagaatcgaagttacaaacccatttcgaatgtagaaaaaggcaagtggtgctaacgttccgacactaagcgaaaaagtaagtaatcctacaccatttttttgttcaaatggtaggaaagtagtcagaaatggcacaaaactaagtaaccctaaaagtgcaacgtaagtgttttcgctgaacagtagaattataaaggtcaaaattggaataatcgccaagggcgccattaaacgtaaattagttttgttagttagacgatcgatagtaagaaaatttaccatgaaagttgctaggaaaaataatatttgaatggaaagatgcttactgaagatttctgagctaaaatggctactaagataccaaggtaccaccgagagtaacaaagcattaatggcgggaagataactctttttttcaataggataattaaattttggtagattgattttattcatataaaactccttatgtttcctgacattaatcgtatacaaaagccgcaggaacgtcaacctaactttaaaagaaagagtgggtgtgatagacttagtaagttactagtgttcccgataggattagttatccaaaagatccttgtaaccgaaattaaatttagggggaatttacatgtcagaaagacatttatttacttcagaatcagtatctgaaggacatccagacaagatagccgatcaaatcagtgactctatcttagatgaactattaaagaacgatccagatgcacgagttgcttgtgaaacaaccgttacgactggattagtagtcgttgtgggagaaatctcaacaacagcttacatcgatatccaaaaggtggttagaaagaccattaaggatattggctatgtaggtggagaatatggatttgatggcgaaaattgtgctgtaattgttgctattgatgaacaatctccagatattgctcaaggagttgatgattccttggaaacgcgtgaaggccatgaagatcgattaaaccaaatcggtgccggagatcaaggtttaatgttcggatacgcaactaatgaaacagaagaattaatgccattaccaattatgttaagtcatcatttgatgcaaagaattgctaaactacgtaaggaacaagttatcagctaccttcgtccagatgctaaggctgaagtgacggttgaatatgatgataatgatcatccagttcgcgtagatacggttgttttaagtactcaacatgatcctgacgtaactttagaacagattcgccaagatgttattgaacaagttatcaaagctgtaatcccagctactcttttagatgaaaacactaatttctacatcaaccctacaggtcgctttgttattggtggaccacaaggggatgccggtttaacagggcgtaagattatcgtggatacctacggtggggccgctcgtcatggtggtggagctttctctggaaaagatgcgactaaggtggaccgttcagcaagttatgccgctcgttacattgccaaaaacattgtagcagctaagttagctgaaagggttgaagttcagattgcttatgcaattggggtcgcagaacctgtttcggtcatggtggatacttttggtaccggtacggtttcagaagaaaaattaacacaagccgttcgtaagatttttgatttacgacctgctggaattattgaaatgttagatttgaaacgtccaatttacaagcagacggctgcttatggtcatttcggacggactgacgttgaactaccatgggaaaagacggataaggttgaagctttaaacgacttttttaaaaactaaaaaatttgattaatggctgtgttgatgtctaaacggatattaacacggctattatattggttgagaggtaataaatggagaaaaaacaaacaaatgtggtcgttgtaacagtcgctatttttgttgcaacttttatgtcggcgattgaaggaacaattgtttcgacagcgatgccgaccattgtaggagatttacatggcgttagtttgatgaattgggttatttcaattttcctactaactaatgcaatatttaccccaatttacgggaagttgtctgatattttcggtcgtaaacgagtgttcatttttggaattattatatttttgattggctcgatgttaagtgggatggcccactcaatgggtttcttgattttatggcgcgcattgcaaggaatcggggctggatcgattatgccggtttctaataccattattgctgatatttatccgattgaaaaacgggccaaggtaatgggactaaatggttcagcatggggaattgcttctattattgctccgctattagggggctttattgttgataatctgagttggcattggattttctttatcaatttaccgattggaattatcaccatctttttaattcagttcttccttaaagaagaggttagtgtccatagcaagaaaattgactacctaggtagtttttggttaatggtagctttactgggactaatgtacggttttcaattgatgggtgaaagttcattctcatggattacattggtgatttcgtttgtgattttcatcgtgggagctggcttatttattcgtcaagaaaaacgggcggaagatcccattattttcctagatttgtttaacaaccgcacatttgtaattcaaaatgtggcgacgatgttggtctctggtttgttgattggtttcgaagtttacttaccaagctggacgcaaggaattttaggagtgccggcttcattagctggatttgcagtaactccaagttcaattttatggattttcggttcattcttggcaggacggatgattgttaagttaaaagccaaccagattttgaccattagtttatcaattctagctgttggtagcttactattagctttagtaccggcttcaacgccgttcttagcgttcttctttattgcagctattttaggagttggttttgggattacaattacttccacattagtaatttcacagcaattagtaactaaagatcggattggggtagcaacttcctttaatactttggctaagacactgggccaaaccattatgatgtccgttttcggaatcattatgaatgggacgatgaatgccggagttaaggcgaaccctaaaattaatatggatatgatgaacaaagttatcaatcctcaaacggctaaaactttaccagaaacgttattgccaacgttgagaaatgttttatatcaagctttgcataatatctacattggttgctttattttgattgtggttgctttaatcactaatgcgtttgaccgtcgctccaaagataatatttaaaaaatgtatttagaaggctagctgagaggctagccttctaaatacattattttttacgctcaatacacaataaaatgggcggattattaatctgattgatgaattcatagcgtaaacacgaatagtgatgttggtcgagttcagctacaaatgaaagtaattgttgcaattcttcttgacctccaggatgaccgtagtaacaaactaggataatacgaccaccaatttttaactgatttaaactttgttggactgccgagatagtggaagtgggatgagtaataattgatttatctccacccggtaaatatcctagattaaagatggccccagtaatgggttcggtgacataatggtcaatttgatcatgactagcatggattagttcaacattagttaagggttgatgctggtgctcaaatagggctcgagtttgctctaaagctgctttttgaacatcaaaactaaaaactcggccagtgctttgaaccaattcacttaaaaataaagtgtcatgaccatttcccatagtggcatcgattaccacatcgccgggttgaacaatttcagttagtaattgatgactgtattgcatggcattatcaagcatttttaattttccttccataaaagagataggttgtaaattgaagaacgattaaaccaagtaagaatcccgccgtaacatccgttggaaaatgaacgtttaaataaattcgggataggccaatgcctagcattagaattaagtagattaatgctagtaagtttcgttttaattgatgatggacaacttggaaagtgataaaaattaggcttccaaataaaaccatagccgccactgaatgaccactaggaaaactataaccaccaatactgattaaacggaattcggggcgttggcgttgaatgatttgtttaattaaatgattaagtccatttccgaggacaatattacaagccaagaataaagcggctttctttaggtgctttagaattaaaattaagcagactatcaagctgataattatgtaaggaatagaattacctagctgggtatagatgctgaccacttgattgaatccaggcgttcggacagattgcaccagactactgatgctgttgtcataggcgtgtacccagctgggcttaaaaataactaaacttacgattaagataaataaaagcgtaggtagaatattgattaataaatgagtatattttctgctgtgcatacgtttctcctttaacttcataattaattttagcatattgagttgtaatgaagcgtggagattggtatgataaacctaactaaatattgtcgataaaagaagtagtagttgggatggacattttaagagaccgaatggctagtggaaattcggaatgactttcaacgaactcgtctttaaaattaacaatcttgaacctaagtagagattgtcgttttccgcgttaaggtattcaagtgtgcattttgcaaaacataggtggtaccgcggaacttttcgtcctaaggattcttttttagaatccttaggttttttttatcgacaaatataataatggaggaaactatggcttataatcataaagatatcgaacagaagtggcagcaattctggagcgacaatgagacttttaagacggtcgaagatgtagacaaacccaaatattatgcattagatatgttcccttatccatcaggtcaaggactccatgtgggtcatcctgaaggatatacagcaacagatattatgtcacgaatgaaacggatgcaaggttacaaagtacttcatccaatgggatgggatgcttttggtcttccagcagaacaatatgcgatgaagacaggtaacaatccgcgtgattttacagctaagaatattcaaaactttaagcgtcaaatccaatcacttggtttttcttatgactggtcgcgagaagttaatacaactgatccagcttactacaagtggactcaatggatttttgagcaactctacaagaagggcttagcttatgaaaaagaaacgctagtaaactgggctcctgatttaatgggtggaacggtagttgctaacgaagaagttgtggatggtaagacagaacgtggtgggttccccgtttatcgtaaaccaatgaaacaatggattcttaaaattacagcttacgccgaccgtttgattgacgatttggacctggtagattggcccgatagtattaaagaaatgcaaaaaaactggattggtcgttcagtgggggctagcgtcttctttaatgttgaagatagcgaaaaacaaattgaagtatttacaacgcgtccagatacattatttggcgcaacatacttggtaatttcaccagaacatgacctcgttgaccaaattacaactccagaaagtaaagctgccgttgaagaatacaagaaagctgttgcaactaaatcagatcttgaacggacggatttgaataaagacaagacgggagtcttcacgggagcatacgcggttaaccctgttaatggtaagaaaattccagtttggattagtgattacgtattggcttcatacggaactggagcagtgatggctgttcctgctcatgatggccgtgactacgaatttgctaagaaattcaagatagatatggtaccagtttatgaaggtggcaatcttgaagatggagtattggacagcgaaggcgggctaattaactctggattcctagatgggatggataagcagacggctattgataccatgattagctggttggaagaacatggagttggtcataagaaggttaactatcgtcttcgtgactgggtcttctctcgtcaacgctactggggtgaaccaatccctgtaattcattgggaagatggagaaacaaccttgattccagaagatgaattgccattgagactcccagctgcaactgacattcgtccttccggtaccggagaaagcccattagctaacttagatgattgggtaaacgtagttgatgaaaatggacgtaagggtcgccgggaaactaatacaatgccacaatgggcgggtagttcatggtacttcctccgttacgttgatcctaagaatgatcaaaagattgctgacgaagatttacttaaagaatggttaccagtcgacttatatgttggtggagctgaacatgcggtacttcatttactttatgcacgtttctggcacaaagttttatatgatctaggagttgtaccaactaaggaaccattccaaaaattggtcaaccaagggatgattctcggtagcaatcatgagaagatgtctaagtcaaaagggaacgtagttaatccagatgatattgttgagcgctttggagcggatactttacgattatacgaaatgttcatgggacctctgacagaatcagtcgcctggagtgaagatgggcttaacggaagtcgtaagtggattgaccgcgtctggcgcttgatgattgacgacgaaaaccaattgcgtgatcatattgttactgaaaatgatggcagtttggatatgatttataaccaaactgttaagaaggtaactgatgattatgaaaacatgcgctttaacacggctatttcacaaatgatggtctttgttaatgaagcatacaaggctgataaacttccagcagtatatatggaaggattagttaagatgttagctccaattattccgcacgttgctgaagaactttggagtttgctaggtcacgaaggtggtatttcatacgctgaatggccaacatatgatgaaagtaagttattagaagctacagttcaagtcattctacaagttaatggtaaagttcggagtaagattaccgttgacaaggatatcgccaaagaagaacttgaaaaattagcgttagctgatgctaaaattcaacaatggacggcagataagactgttcgtaaggtaattgttattcctaacaagatcgttaatatcgtagtaggctaactaaatcaaaagtagggtccagatgttttaacagcatcgtggacccttttttgtagaaaaatagtttggaaaatgaactaattttgagagtttggtggattttttaagtgttagctgagctatcagcgtaaatttaattgtatcggaggtatgaattgtattaaaatagtgtagattgactagagaaagtaggtttttataaatggataagcaatctgaaatggataattcagagtctctctatatgggttcacaacccttaagagataattcaggaaaatcttcatccaaagcaaagatgctcgaaggttcggcgtggatgaccgccggaagtatcttttctagaatattaggcgccatttatattatcccatgggtaatttggtttggtgtttatagtgaccaagcgaacgctctttttactaaaggatataatatttatagtttctttctaattgctgcgattgcagggattccatctgcgatttccaagcaggtatcccattacaacgcaattaatgagtttgcgttggggcaacgtttgtataagcgggggcttttgttatccgttggaacgggaattatctgtgccgcaattctgtattttggcgctccatttttaaaagatggtgacccgaacgtaattacggttctccatgcgttggcttgggcagtgttagtaattcctacgatgagtttgactcggggctttttccaaggttaccaagaaatgggaccatcagccgtttctcaatttattgagcaattagcccgagtgatttatatgctaacaaccgcctattttattatgggaaaaagcggtcaaggcgattgggtttatggcgtttcacaatcaacctttgcggcttttattggtgcattaggtggattattagtgcttgggatttatttcattaaataccgtaagcgactttcctatttgtcacaacatagtgccaatgaactggtagtttcaacgtcaacgctatataaagaaattattgctcaagctgtaccttttattattattggatcagctattacaattttccaattaatcgaccaatacacctttttccggattatgaatgcggtgagtgactattcgactgccgtcttaaataatatgtacgcaatctttgcttttaatgctaataaactggtaatgattgttatttcattagcgtcagcgatggccgtcacttccgtaccgattttatcggaagccaaaactaggggcgatcgagcagaaattagtcgacaagtaacggattcaattttgctctttgcatttttgatgattccagctgctttagggatggctgcggtagctcaaccagcatacacgctgttctatcatctaagtgatgtaggaactgccattttacaatttaattcttatgtagcaattgttttaggattatttacagtgatttcggctattatgcaaggaattggtgaaaatgtcttagccgtgaagtatttctgtgtcggaatgattgttaaatttattttccaatttcccatggtggcattattttcagcagtgggttcattaatttcaacggctattggatttatggtagtgaattggttgattttacggcatatcaacttggaatatggcttagattatcgtcgaattaatacatttattggaaaaatcatcacttatgcttttggaacattcttgattgcaatggtcgtaactaatggattatacatagtgatggatccagccagtaaagtacaatcgttactagttatagctgcggccgtagttttaggtggagcattttatctctactttgtattaaagagccgcctagcggatgaaattgttggggcacgggcagctggcttacgtcgaatgctaaagattagttaggaggagacatgcgagtagataaatttttacatgacatgaatatgggaacgcgaacccaaattcgaaaaatgattaaagacaagctaatctttgttaacgatacggtcgttaaaactgggcgagttaaagtagatccagtgattgatgaggttagattaaaagaccaagtgattgagtatcaacaatatttctatttcgtgatgaacaaaccattgggagtcttaactgctacggaagatcgtaaacaaaaaaccgttatggatttattcaacaaggtcgatctccgaagtgatttatttccagtcggaagattggataaagatacccaaggcttgctgctaatcactaataacgggcagttagcgcatgatttattagcaccagagcggcacgttgataaaacttacgaggcggtggtaactggaaaaatcaccgatcaagctgtcgaagaatttcaaaaaggaatcaccttaaaggatggtactacgttaaaaccagcgcaactgatcattgaacactattcagaattagatgatcaaacagtggttaaggtagtcctaaaagaaggaaagtatcatcaggttcgccgaatgtttggtagcctaggtgagaaagtggtcactcttcgaaggacttcctttggtcctttagaattagatgtgggattacttcccggaacttatcgagaattaacggatgatgaaattaatcggttagttgaaggttaaaaataagctactatgatttttatcatagtagcttatttttttgaagttgttttagtgtgaaggggagacgacgaattaagcgatggggcaaaacaaccgcttctttttgataaatttgatcggcggtataactgtgtaagaaggttcctaaggtaacacctaaggccaaagagtcgacttggtttactaacgcaataattactccagttaaggcgtctcctgaaccacctgttgccatcccagggttaccagccataatttggcgaaagtcggtatgaggagcgtaaatttcagtttcataatgctttagaactacaattgcttttaaatgatcaactgcacgttgatttagcgtgggggcttgatctgctatctttattccggaaagtcgttgccattccatttggtgaggagtaaaaatagtttggggatgatctacttgaatttgatgggtagcaatcaaatcaatcgctgaaccatcaataactaaaggtgtttggggttgaacgtggtccaagaccaattttaaaatttttaagctagtagcattagttcccaatcccggaccgattaccactcccgttgatttttttagggctgcttttaaagcatcaaaatctaagaaatcgagcaacataacttcggctagggtggagcggacagccgtaaagttagatttatccgttgctaaggttactaatccacctccagcataaactgccgctgaacttgataaaattccagcgcctccatattgatcattaccagctacgattaaaatccgaccataacttcccttgtgactatcattggaacggacaggccataagtcgttcaatccgtcctgattaatctttaacattgtgatcacctcgtaaatgtagtataccgcaaactagtataaaacatgcaaaataaaaatcgaagaaaatgcataaaactctattatgtaagcgctaaattgttataatagaagttgaaaggttggtgtgtaatatggattataaaaaaattttatttggctatgatggttcaccagaatcaatggcagcttttgatcgagtaattgaggttgcgaagagaaacgatgcaaaacttattattgctcatgtagtaaaaaggcaacacgctaacactgagagtgtttcccttggctttggtgttgtatcaacagatgatgacattgaggacattcttcgttctagggaagataaacttgaagttttgaaacaaaaagctaacgaaaaaggcgttgaagatgtgaaaattgcccttaaaattggtagtcctaaatcaatgttaagccgtgaattgcctaaagaatacgatatcgatctaatcgttttaggtgcgaccggactaggcaaggtcgctcaagtatttatcggttcaacggctagttatgtagtcgaaaattcacctacagacgttatgattgttaaaaattaaatgataaacaaaatgacctcaattgtcggcactttagttttaaactagagtggaacgacaattgaggtcattttaaattagattgctttatgcataggttcttcaacccgaacttctttaagtttagcattgatttgtttaaggatgattttaacgttttcttcgttgcttaaatcgtacttttgtaaatcaattttcattttaggaccaacatcatattcttcgtaccatgtcttgtaagccgaccacatcttatagtagtaagattccaattcaggattgttatcgaattgttcgtattcacgcccacgtttacgaatacgatagaggatggtatcaaaatctgtttcagcatagaccatcaaatctggtgctttcttaggtagattttgaagctcactcatcatgttatcaagaaggttcatgtaaacttcaaattcagtatccgtaatgttaccttctttgttgttttcgcgtgtgaatagagcatcttcgtagattgagcggtctaatacattattatcatcagtcaaagcttttttgatcatttggaatcgtttattcaaaaaataaatttgaagtaagaatccataacttttttggtcagaataatagagtggtaaaacgggattgtctccaactggttcgtagaacgcctttgttccatagtagtcagcaattttccccgttaatgtagttttaccgacgccgatcattcctgctgtaattatcaccataaaatgctcccttttccattttttttgccgaaatctagtattaataaatcctaaatctttaaacagccacaacatattgtataaagaattgaagcgcaaaacaagcttgaattttatttaaaaaactgcttagtatttgaatacccaaaaatgaaatggtttacttaaaaaattaattattatttgaaaagcgctaccaaattcgataggctagagatatgttagattgtgaggaagaattttatgataaaactaatcgttagtgatttagatgaaactttagtaggaccagacggaaatgtttctgaagaaaacattgaagccattaaaaaagcaactcaaaagggggttaagtttgtccctaataccggacgaggatttgaatcggtacaacctttattagaaactctgggattgaagggaaaagcaaatgaatttgtgatttcatataatggtggagcaattgttgaaaatcaaaattttgatgtaatccaagctaatgcattttcgtttgagcaagctactcagatttttgatataaccaagcagcatttggagaattcgacgcatatttatacgttaaatgatgtttatgtatttaatgaagttgaagaagataatgaatatattcgtagtcgtggggttcgcaccattagatttgaacatgataatctggatacattaaaagatgaaccaatttttaaaataattacaatgaatcctgattttaataagagaaaacagattaaagcagaagtactagataaagttaatttcgatgtgaatgctactttttcttcagatcgatatactgaatttaatttaaaaggtgtcgataagggtcaagctacgctagaacttggacgccatctaggtataaaagcggatgaaataatggcattgggcgataataataatgatgtagcaatgcttaagagtgtgggacttcctgtggtagtttccaatgctagtgcatctgctaaagcaaatgctaaatatattgctaaaggaaattatgagacaggtgtggctgaggcaattaacaaatttgtattagggaaatagtagcatgcaaaaaaagacttattaccgaagttcgctgattttactgatcctatcaacgattattatgataatgacttgggtgtcatcattgagtaaaacgaataaatttattattataataattgttgggataattctgacatggtatattcaatatttctcaacgcgactgacagatgttaagaaaaatgggagaaagcaatgaagacattgaaaattgggattcccttgattgtggcggtaattttggtactcgtgacggaatttacgcacatgagcggggcaccattggtaattatgtgggtcattggatttttattttcaatgattgtaactgcggtgattgaaattcgaacacgaatgcaagaatttgctaagcaacaaaaagaggaagaaaagcagcagggggaagaataaatgtttatcacaaccgaaggtatcaatgccggttatacaattaaggacgtggttgaagcaaccggtagcttgatgttagcttccgaagacatcgataagtacaatatgtttgatcaactatttgatgaagcaaaacaaaagttgaaaaagaaagctgatttgcttgaaggcgacggaattatcggcttaaagtacaatacagaagtagtagaagtcaatggggcacccaagtttttggtagtccatggttatggtacagtaatcttaattgataaatagaaacgactaagaaacaggattgtaaatcctgtttcttttttcgatacttaattgatttttctgtaacatattaaaggacttattagccacaataatcgcttattgggtgtggcgtttaacttcgaggggaacgatatcacaaattttaacccgcacggtatagttaactttataagcggcataacggtcgctaggatcatagtctagaatgtctacaattgcatcattatcaatcacatcgctaatttttccaacgaaaggtttcgagaggtcgttggatttataacatttaacgatccgattagcttggaatgtgtttaccacgtcatctcaactccttgtgtctattatatcttatttattgatattatatcttatttgtggtcatttccagtgctaataatactgataaagagtaaaaatatgctcattttgcgacaaagaaaaaatatttgttcacttttaataaggggaggtgtaaaatgtgtttgttaagccacagtggcggaattggcagacgcgcagcgttcaggtcgctgtataggcaactatgtgcaagttcgaatcttgtctgtggcatataattttaacgtatataaattaaaggaaactagaaattaattgagaaatttaacttctagtttttttgtgttggtgaaacgattcacatcgttgaagatttaccctgagcaaaaaactggcgtaaaattagataaaaagtatactgatgctgtaattgattttttgaaaggaatagatgatgcgaaaactaaagtatactcaacaagatcagtgggaatcagaggctcgagaaacccaatcaccaattctaattgaaacggcaaagttaaaagctaagaaaaatcagattgtggatgggttgaaaaattatactgcaacagaattacataaaaattataatagtttatcgttaactgctaatgggaaaatggaagcagatcaacgaagcttccagctggaggaggttcatttccatcatccagcagaacattgctttaagggtgaggctacaccgcgagtactagaggcacacttcgtccattatggtcgcctcagacagcctttagtggtcagtgtgacctttaagttggggtctaaaaatgctacttttgaaaaaatattaacggctatggatgataataaagtggaacaattcatacttttagatgatttgattccaaaaaggggttatttttatcgctacataggttcattgactactcctccattaacggagggcgtagagtgggtggtatttgagcaagcccaaatgattgatattgatcaacttaatcactatatggcgacatttaaggaacaaaataatcgagaactgcaaaaattaaaccaccgaaaaattgaaaaatatgaaatttaagctaaaaagctggtgtcaacgaaagtaacagagacaatgactaaacaatcattgggaatactttcgatgacaccagcttttatattgcatggataattaaagaaattccaaaaatcaaaaataatagagcaatcatcatagaaatggagattgcagtaataaggggtgagaatagtaaaacaattcctaggataatacccaagattgagataaatacatctaaaacaaaatatttgtggctaaaatttctaatataattagccagccaaagggtggtgaaggaatcacctaaaaacattaaagcaatcaagactgaaacatagaccataccaaacgaatcattgaataacattagaaatccgacgatgatgtcaagtacggcatttagggtcaaccaagtagttttaccaagaaaaggtcggatccaaaataatttataaaatcccgtagataaggacgcaatggcggcgatgacaatcaccatcctaaaagttgataaaggatttttgattgaaaaaatagcaatcacaataaacaaaacacctaaaattagagcaaacggatcaaacttattaatacgattttccatctaaatcactactttcttgaagtttttattcagccaaaaaaggttggaaagagctaaattgtacatcgaattttaaaagtagtatcttaaaggctaaagtactactatccgacactaatctagttagcttcattttagagagattggttgaattgttcaaacaataagaattcgaaatcacgattaattgttgatgcaacgttttattttccagttaacatatttaagaataattaacggtagtagtattggtttctaatttttgctaaaatgttatctgttactggaattatagaacgatatgtatatatttgaaaaataaaaggggattacaaaatgtgcggatttgctggttacattaatcaagctaatgtaaataaagacacaatcaagtcaatggccgatcgaattaaacaccgaggaccagacgatgaagcatttttccaagatgaaaatgcgtcaatgggattccgtcgcctatcaattattgatttggcacacggacgtcaacccatgatgaatagtgctgaaactaaagtattaactttcaatggtgaaatttataactacaaacaagttcgtgaagaactaaaagaattaggatatgaatttagaacggatgttgattcagaagtcctaatccatggttatgacgcatggggaccagaattacttaaaaaacttcgtgggatgtttgcctttgtaatttatgataaagaaaaacaagaagtatttggtgctcgtgatcattttggaatcaagcctctttactactacgatgatgataaaacgttcctttggggttcagaaatcaaatcattcctagaacatccaaactttgtgaaggaattcaatgaagaactattaccaatccacttaagttttgaatttattccttctaaagaaacgatgtttaagaatgtttacaagcttcttccaggaacttacttcattcataaaaatggtaaaacagaaacccatacttactttaaatttaactacgaccatatcgacgaatcacaaactatcgaagaagattcaaagaaaattcgaaagattgttagtgactctgtagatgcacatatgattgcagacgttgaagttggtagtttcttatctagtggaattgattcaagttatgttttagcagaagctgctaaacttaaacctatccaatctttctcacttggatttagaaattctaagtatagtgaattaagttactcaactgaatttgctaaggaaatcaatcaaaagaatacaccactctacatggatggtgatgattactttgatattttgccaactatcatgtactacatggatgaaccactatcaaatccatcagcaatgcaattattctatctttccaaaggtactcgtaagaatgtcaaagtggctctttcaggagaaggtgccgatgaattctttggtggatacaatacttatctagaagctttcacatttgaacgttaccaaaagatggttcctagctttattcgaaaagggttggctaaggcagtttcaggtcttcctcgtttccatggacgtcgtttcttgatgcgtggggctcagccacttagtgaacgctattaccgcgtaaattacgtatttaatcaacaagaacgtgatcaaattttacgtaatccagctttgaatgttgattcaggagcttatacacaacatatctttgacgaagtgaagggaaaagatgagatgactcaaatgcaatactttgacatcaatacttggcttccatttgatatcttgcacaaagctgatcgaatgagtatggctaactcactagaagttcggacaccgttggttgaccgggaagtagccaaatttgctgcaaccatgccaattaagactcgaattcataaagaagaaactaaggtatctcttcgtcgtgctgcagaagctgaattaccagaacgagtagctaagaaggaaaaacttggtttcccatctccaatcgccaactggattaaagaagataagtatcgtaaacgaattgaagcagctttcaattcagacattgctaagaaattctttaagccagaagctttaatgcatattcttgaagaacatgttaacggaaaatcaagtatgcaaaagattttcacaatttacacatttattttatggtatggagttttcttcccagaagataccaatactaatacaatagatttagttaagagaactcaagtataggtggagatgaaatagatggaccttgaaattgccactgttaaggcaatccttacagaacatgatttattaaaagaaatcaaatcaactaaaacagttgcaaatactggaatatcttatgattctagaaccgtaaagccaggttatatgttcttttgcaaaggaaatttcaaaccagagtatttatcagtagcccgccaaaatggtgctaccacttatgtgtctgagaatgaatatccagaaggaaccggcatgactgcgattattgtaacgaatgttacaagagccatggcggttctttcggctacttattacaattttccgcaaaatgacttgtttattatcgggattacgggaacgaagggtaagaccagttcagcttactttgcacactcaattttgaatcaaaagtatccaaaccaagtggctctattttcaacaattgatcgaattgtgggacccaagcctgaggaccaatttaaatcagatttaaccacaccagaatcaatgaatttattccatgatatgcgagtcgctgtggataatgggatgaaatatctggtaatggaagtgtcttcgcaagcttatttaagagaccgggtttatggattaaaatttgattgtggaatctttttaaacattacgccggatcacattgggcgcaatgagcacaaagattttgaagattacttgcattgcaaattacaattaatggttaactctaaacgttgtattattgatgcagatacagatcgttttgatgatgtttttggcgctgcaaaagcaacaactgatccggaacaaatttatttgtttagtgcagatgttgaaaatggcggagtagatttcttaattcaagatgaagaagatgatcttacttccaatcgattcactttggttgaaagcagttcaaaagcagaagcattccacgtggcaggtgattacgatttaaatgtggcgggcgattacaatcaaagtaatgcaacggctgccattattgctgctgcccttgcagacgttacttatcaggatgcagtgttaccactaaaatcaatcgtgattccaggtcgtatggaacatctagatgttccaggacatggagtggtttttgtagattatgcacacaattatgctagtttgcacgcactattaaaattcttaaagcatcaatatcacgatggtaaggttatcgtggtggttggaagtcctggtgataaagggatttcgagaagagctgggttcggtcaagcgttgagtgaacaagcagatattgcttatttgacaacggatgatccagcttttgaagatccagaacaaattatccagcaaattatggataatattaaacctggtacagttgaagttcgtcaggtacttgaccgacacgatgcaatcgagcaagcgattatgaatagtagtgagaaagatgtggtcgtgcttgccggaaaaggtgaagatccataccaaaaagttggaggggtagatactccttggccaactgatatgggagtagcagaagaagtgaagaggggattaagttaatggaaagaccaactaacaattttacgccaattctattaggtagtgattttaatgcttatgggatggctcgttcattttacgaaattacaggaagacgtgttcaagcgtatgccgggaccgtgctagcacccacacgttttactaaaatcgtgaatgttgatattattcctggtttttcagaagaccctgtttttattgaatcaatgcgtaaaattgctaaaaaatacgaaaattctgacgagaaggttgttttactagggatgggcgatggctacgctgaattgatttcaaagcataaagaagagttgtcaaaaactttcatttgtccatacatcgattatgatttattgaaacaattgaataataaagaacgtttttattcaatttgtgatgaatataatttaccatatccagcaacccattttattacgaaggcacaatatgaaagtggtgagaaattcatctcaccttttgaatttccggttgctttgaagccagctgacagtgtagaatggctcgatattcattttgaaggtcgtaaaaaagctttcagaattaaaactcaagcagaacttgatgaagtcattggtaaaatctatgacaatggctatacttctgatttgattttacaagattttattccaggtgatgatagcaacatgcgagttttgaatgcttatgttgatcaaaatcatcaagtaaaaatgatgtgtttaggtcatccattattggaggatccagctccatcagcaattggaaactacgtagcaattattcctgaatttaaccaagaaatttatgacacggttaaaaactttcttgaaagtatcaattacgttggatatgccaactttgatatgaaatatgacagtcgggatggtaagtttaaattatttgaaatcaatattcgtcaaggccgtagtagcttctttgttacattaaatggatacaacctagctcgttgggtggttgaagaccgagttaacaatgcgttggctgatcgtgaaactgtatacgctaatgatgttccaggcaactggaagttatggttgggcgttccagttaaggtcttcaaaaagtatgctaaaaataatgatgataagcaaaaggcacttgaactaattaacaatgatcaatatggatttaccgctatctacgatgaggatatgaactttaagcgtagcttattaatgtggtggatgaaccataattatgttaagaactttaggaagtattttaaggaaaataaggggtaagacctgtgaaaaaattctttacgattattggtggaatggggactccagcaactgaaagttacattaggttattaaatgctagaactcctacccatcgcgatcaagattatttaaattacattttagtaaaccatgctacagttccggatcgttcaacctatttaatggaccattcgcaaccaaacccttacccagatttattagaggacattcaagaacaaagcaagctgaatccagccttttttgtaattgcctgtaatactgcacactttttctatgatgatttgcaaaaagcaacggatgtgcccattgtgcatatgccccgcgaaactgtaaaacatatcaaagagcagtatccaaatgctaaaaaaatcgggattattgggacacctggaacgactagtgatggaatttatgaccgtgaattgttagctgaaggttttgaagttgttaaaccaactaaagcaattcaggatttaactagcaagttaatttttgatgatatcaaagaacaaaatctagtcgatgctgagcttttctatcatattctaaaaatgatggtagaagaacaaggagccgatgtggtgattttaggttgtactgaattatcgtatgctcaggaaatggctcatgatcacagttttccggttgcagattcacaatcggtattagtagataaatcgatcgaaatggctttgaaactaagaaagtaaaaataaaagttgggattaaactaaaccagtttgtcccaactttttactatgattaacttggaggaagagatgagtaaacgaagaagaaaaaataagcagtctactagtatttggcttgttttagtaattgccattttaggaacttttttcaaaggaaatgatattcatcagtttgtttctaatctgattagtcaggggatcccacaaacgactaaatcggttaaaagtgtcgaggatactcaattatctcaacaaacttttaaatccggtggaacagcttatatttacgttaacaataataaaagtacccttaatcccgcagattggaagaaaaaccaaattatttacggtaatttagatcgtttgaatcggacgacacaagcaacgggatatctaagtcgtgtaaacttagttaagtcgaataccagaaccagtcagacttggaatccaactggttggcatcaaaaacgtttaaccattaacggtaaaacaactgaaattcagaaccgaggccatttactagcatattcaattactggtaaatttgatcaaaatgggaatttcaatgctcatgaattaggatcattagataatcccaaaaatctagctactcaaacagcatacagtaatcagcagactatgcaaatttttgaggaacgggtccgggatgcattagctaagaataaaaaggttatttaccgcgtctcgactgtttttaaaggaaatggattaatgccaactggctaccatgcagaagctatttcaacagatggatcgttaaattttaacgtttttgtttggaatgtacaaccgggggttcaatttgattatgcaaccggacgatcacgagtggatcgtagtatgacagtaagagcaaattaaagattaaacgattaatcgatatgattaatcgtttttttattacgttaaactttttaaattggagtggaagatatatactaaaaacataaatctatatgatatcgcttactttacgttagggggagacgttaatggaaaattcgaaagataatcgaagctttagatggtttaatatcgcactgatttcatttacagcagtttggggtcttaacaacgttgtaaataattttgctaatcaaggtttagttgttattgtttcatggatattaataatgctattatattttattccgtataccttgatggtaggtcaattaggttctacctttagagaagctgaggggggtgtatcgtcatggatgaaggaactttccaatagccagcttgcttattttgcggcttggacatactgggtggtccatgtgccatacttagcccaaaagccacaaactattttgattggttttagttggatgttcaaaaataacggtagctttgttaatcaaaccccatcttatgttgttcaaggattaagtttgataatctttttagcatttgtttggatggcttccaaaggagtgacaactctgaaccgaattgggagtattgctggaattgcgatgtttatcatgtcaattttattcattattttaggaatttcagcgccatttatcacgcattcagctattgccacagctcacatggatcaatttagtacatatatgccaaaatttaattttaattactttacaacgatttcaatgctagtttttgcggttggtggtgcagaaaaaatttcaccatacgttaacaaaaccagaaatccagctaaagaatttccgttgggaatgattttgttggcaatcatggtggctatatcagcaattttaggttcttttgcgatgggaatgatttttgatgcacaacatattcctaatgacttgatggccaatggttcttatacggctttccaaattttgggtaatcaatttcacgttggcaatacattaacttggatttacgcctttgctaatatcttggctaattcggcagctttagcgatttcgatcgatgcaccactacgaattttgttaaatgatgcggatagtaattatgtgccagcatttcttactagaaaaaatgctaaaggaattgcttataatggttacaaattaactgcaattttagtttcaattattattattgtgccggccttaggaatcggcggaatgaatgatttgtataattggttaatgaatttaaactcaattgttatgccaatgcggtacctttgggtatttgtggcctacatgttattgatgaaacaaattaataattataaatctgattacgtatttgttaaaaatactaagattggttttggttttggactatggtgctttattttcacagcttttgcatgtattttaggagttattccaaaggctgattttgcagctaatccaactagctggtggttccaattagcgcttaatattatcacaccatttgcattaattattttaggattgattttaccggttattgcacggcgaaatcagaataagttagattaggactgaaatttttaattttatattagagaatgagaaagggaaatccaactcgtggcggagttggatttctctttttttatgattcaactttacaattcaatttttttgaactaaaattaattcatatgcgaatgtagtttagtggtaaaattcaagcttcccaagcttgtgtcgcgggttcgattcccgtcattcgcttcactgaaaaacaaaatagatttatttaaacaagaaaccctactatcaactaaagatagcagggtttttattataagttattttttaagattgaaagtaactgtatcctcatcttctaaaatagcagaatattggtaatacagtttcttttgaacgtaagctgctttccatttttgagatagaaaggacatcaagaaaagggatgcagtactggtgatgcccgctaatccagcaaacccaacgtcaacccaaggcgcattagcgtcgttagatttatttttggagagtagggcttttgagacaataattttaggagtctttgtgttaatccttttttttaaatcaccagtacttgtaatcatagcgatcaatcctttctagttaaatataattgctcacctgcattataacactatcgaaaaaataaactgtgttaattttatttaaaaattaattttttgagggcgtttttaatgccatcagcgtcattagaactggtaatcatatcagcatgggatttggctaaatcggaaccattctccatggcgacggccgtaccaacaaaatcaaacatcgggatatcgttttgctcatcaccaaatgcaatgatttcttcagggtgaatacctaatttttcggagagagttttgagagccgcccctttatttacatttttatgcataacttcaagaaaattatcggctgctcgaaccacataacattgatcatcaaaggcagcatgaacagcttcttctacttgatttaactctgctgtttcaccaacaaaaatgcccttagtaatggtgaaatcagcaggaagttgatcaggagttttaattaataagccagctttattttcccaagcctggacaaccgtaaaacgattgacttcaaggttactggtgtagatattgctgtcacgatccagtacgttataagcaacgtgatattttcgagaaaattcatccattgctcgataaactgagttggaaagttcatgacttgcaattacttcaccagtcacagattcgattacagaaccgttataagtgatgacgtattggtcgtctgcggtaatacccaattcatttaggaaaggctttacaccagcgagaggacgccctgaacagagcacgactttaaggtgattttgaagacacttagcaatgatatctttggtggatggtaatagtacgatatttgaatttaacagggtatcatctacatcaatagcaattaatttgggagtcataagtagtcctactttctaagttttatctatgtataagtatagagatataaagttgatagtggcgttttttatgttaggaacattttccaaaaataagattcggatttgacgaaaagaaaataaattttttatatacaaatgaaattttcaaaatttttttcaaaaaaccagttataatagagggtagtaaacatttcggaggactaaaatgactaagcaaacatttgaatttgatagcgaactagaagtaaatcgtttaggttttggagcgatgcaattacctggtacaggagtttggggaccaagtacggatgaagaaaatgcagtcgcggtggtaaaagcagttttaaatagcgatgttaattttattgatacagcagactcatacgggcctttttacgctaatttatatataaaagcggctctaaaggattatcaaggaccgcataagctaattgctagtaaagttggtttcacgcgtccaggccctaatcaatggtctgtagtgggtgatccagattatttaagacaacaagtagagttaaatttacgtacacttgggcttgatagtatcgacttaatgcagttgcatcgagttgatcctcgttttccaattgaagaacaagttggtgttttagcagatatgcaaaaagaaggtaaaattcgtcatatcggcttaagtcaagtaaccgtagaacaaatcaaacgggctcaagctgttgctaaaattgcatccgtccaaaatcgctacaatttaattgagcgtgatgatgaagatgttcttcaatatgcagaagaaaaccacatggcatttattccttggttcccactggcgactggtagattagctcaagaagaacatgggattttatctcaaattgccaataatcatcttgctacgccaagccaaattgcattagcgtggctgttgcaaaaatcagatgtgattttgccaattccaggaacatctaacattcaacattttgaaagtaatatccaagcagcttacattacactttcagatgctgaatttaatgcactagaacaattataattaagtagtggaacttcatagaagagtctgatataatgaatcggtaattagtagggtagtagtaggctttaatcttatctaagcgagtctgagttggtgtgagtcagatataaggtaaagttgaaggcgtgaccttatggatattaatttaataaataagtggattatttaatcaattagagtggtaccgcgggaaatctcgtctcttacatttttacgaatgtaagaggcgttttttatttcgcagaatggaggaaaaaatggattataagaagaaagttgctgctgctttagcacctgcactaaacgagtatcttactgatacagaaatttacgaaaaaattgaaattcctaaggaaagtaagatgggtgattacgcctttccaacctttaccttagctaaggtattgcgcaaagcaccacaaatgattgcgagtgaattggttgaaaagattgaccaagatcaatttgaaaaggttgaagttgctggaccatatattaatttcttccttgacaagactgcttttggagcagaagttttaggtacagttttaagtcaaaaagctgaatatggtcaaaatgacgatggtaatcaaggaaatgttccaattgatatgtcatctcctaacattgctaaaccaatctcaatgggacatttacggtcaacagtaattggtaactcattgtcattaattatgagtaaaaatgggtacaatccaattaagattaaccatcttggagactggggaactcaatttggtaagttgatcacagcttacaagctttggggtagcgaagaggaagttaaagcagatccaattaacaagttacttgaatactatgttcgtttccataaagaagaccaagaaaaaccagaactagacgacattgctcgagactggtttaagaagcttgaagatggtgatgaagaagccatgaacctttggcaatggttccgtgaagaatcgctaaaatcgtttaagcaaatttatgacaaactaggaattacatttgattcatataagggtgaagctttctacaacgataagatggatgaaattgtccaaattcttgaagacaagggtctgcttaaagaaagccaaggagctcaagtagttgacttagagaagtacaatttaaatccagcattaattaagaagacggatggagcaaccctttacattactcgtgatttagctgctgctttgtatcgttaccggacttatgattttaaccaatcattgtatgttgttggtgctgaacaaactaaccatttcaagcaactaaaggctgttttaaaggaaatgggcttcgattggtcggatgatgtacatcatattccatttggtttaattaccttgaatggtaaaaagctttcaactcgttcaggtcgggttgtattgctggatgaagttttaaatgatgcagttagtttggctaaaaaacaaattaacgataagaacccggatttggctaatgcagatactgtagctaaagaagtcggtgtcggtgcggtaatcttccatgatcttaagaatgaaagaaccaactcatttgatttcaatctagaagatgttgttcgttttgaaggggaaacagggccttacgttcaatatagtcgagctcgtgctgaaagtattttgagaaaagctggcgatgtcgaagaattcgctcaattaaatattacggatcctaaagcttgggatactttgaaagctcttcaaggtttccctaatattgtgaagcgagcagctgctcaatatgaaccttcggtaatcgctaagtatgccctaggtttagcaaaggccttcaacaaatattatgctaactctaaaattttggctgacgatgaagaaaaaacagctcgtttagcattggttaagagtgtaagtattgtactagaagaatccttacgcctattaggagtaaaagctcctgacgaaatgtaataactgaactaattttaaaataaaaaagtgaatatttcgtaatttataaatgaggaccgcgttcaaaatgatgttttttggaccggttttttattttctcataaaatactcataattttaatcaagatagcgctttacaaatgaattacacctttttggacctaaactacacgatttggactaaaaattacatattaaattctgtttttgattccgttagactgtttacatcatcaaaatcaaacttatttggaggaatttaagcatgataaataatcagttggagttagaggttaagagtttcttagaaggacaatcagattttgctaacttacctagttcggaaattacacgattgagtcaggtgatcagaaagaaaaaaattcgccaaggacagtggatttttgatcaggaggatgaatttgaatatgtatttttgatgaaggagggacacgttaaaatgttttcgatgaatctagaaggggacatgacttctgtctcatatatcgttccgcagatggtttttccactgcgagggatcttgcaaggccgaaaatattgctataatgcagttgcaatgtgtacctcagaagtttacattttacccatcaaagagatgcgtaaaattattgttcatcattacgcttttacgatggcatttatgagacggatggagcaccaccttcaccgttcagaaaaactattagaaaaaacaacgtgttctagcgcagctcaacgggtgcgtcaggtattagattatttaaatgaagactatgcgcagacgcatggtactgttaagaaggtaccttttaaaatatttttgaaagatttggcggttttgagtgccactacgagtgaaactgccggatcggtaattaaagcaatgaaagaagaaaagaaagtgctgtataataataaaataatttcgtttatataaatattgagcggagcgtgaagatatgaaaaaagaattacgtcagaaaaaaatattaaatttaatttctaaaaaaaatattgcaactcaactagaattaattgatgcactagcagaaattggtattaaaaccacgcaagcaacgttatctagagatattaaagagttacatctagttaaaaaaacagatattacaggggaggtcgcttatcgagttttaaatgcagaagaacaagtcgaatataatagtggacccgttcgcgatatttttaaggaaagtgtaaatggtattacacaagtacaatttattaatattatccaaactgatccaaatgacggtagtcgggtagcagcggtaatcgatgacgcagaaattgatggagttaagggaacattagccgggtatgatacactggtgatatttagcgcagatgctgaagcggccgaagctttgcatcagaagttaaaatcatttttagaataaaataggttattaagacgaagttaaaaagggcaatcaacctcggtagaataacattgatatgataaactattaaagtatcgtaatcagcaacgaggtaaatgtatgaatatgaaaaaaatagggagtgcgattaaagcattcttacaaaagattggtgcatttttaaaacccgtgtgggataaaattcacccgttcatccataagtactggcacagatatcagcttacgcgatggattattgtagtagttttagcagttgtatttttctcaagtgcgattttaacttatcaagcgaagactgctaatgtaaaaaatttaaaagcagctttatcccagcctactttagtttatgataaaaataatgctaaagctggaagtttatattctcaaaaaggaacctggacaaatctagataatatctcacctaacgttcaaaatgccgtcattgcgacggaagaccgaaacttttataaggaatatggtttttcaattaagggaatcggtagagcgtttgtgatgtacggggtcaataaattacttggtcgagattatatatctggtgggggaagtactttaacccaacaattagtaaaaaacgcctttctatcacagcaacagacctttactagaaaggctaaagagttatttttatcaattgaagttgaaaatgtttattcaaaaaaagatatcttagcaatgtacttgaataacgcctattttggaaatggggtttggggagtacaggatgctgctgagaggtatttcggggtcagtgcttcggaactatcggttccccaagcggcaaccttggcagggatgctgactaatccgagtggctataatccaatcgatcatccaaaaaatgctttttcacgccgtaatgtagttttaagtttgatggcggaaaccggtaagatatccaaggccgacgccaaatcctatgctcaaacagctatctcaaccagtgataattacaatagtgaggacggttataagtatccatactactttgatgcagtaatcgatgaagccattagtaagtatggattgacggagtcggatattatgaatcgcgggtataaaatttatacgtatctggatcaggatagtcagcaaggtatgcaagatacttttgacaactccgctaattttccggttgatgctacggatggtactaaagtacaggctgcatctgttgcagtaaatgccaaaaatggtggtgtagaagcggtagttggtggtcgtggtaatcatgtctttagaggctataaccgtgctacccagattaaacgccaacctggctcaaccttaaaacctattgcagtttacgcccctgctttagcgagtggatatagttatagttctatgttagaagataaacttcaaacatatggaactaataaatataaacctgaaaattacaataacgaatatgcaggaaagattgcgatgtaccaagcacttgaacaaagtaaaaatgcgcctgcggtatggttattaaataaaattggtgtagataagggttacgattacaccaagaaatttggcttgaatccaagcaaagatgataagaatctagcgatggctcttggtggattgacgaatggtgtatcgccaattcaactagcttctgcttatactgcatttgctaataatgggacgttgtcgaagactggatttattcgcaaaattgtagatgcttctggaaatacgatcgtaaataacaccacggaatccaaacgagttatttcaaaaaaggtcgctaaagaaatgaccagtatgatgttaggtgtttatggtaacagttctggcacaggttatggggcagaaccttctggttatacaattgctggtaaaacaggtagtactgaagcagatacaggaactagttcatcagatgcaacccgtgacaaatggatggtaggatatacaaaggatgttgtagttgctacttgggaagggtttgatgacacaaacaagacccatcatctggaaaatattacgggagtcggcatgaatagtgtgttcaagagtgaaatgagtgccattttaccaaatacgaaaggtacttcattcgacgttaaatcagcttctaccctagctaatagtggaaacaatgttacctcaaacgtttgggataatattgaagacggaacttcttccatcacagatagtatttctcgaggagctagtggggtcaaagagaaagcgggagaattcttcaacgaagctaaaaagttcattaccgggaattgatttttatattaaaaacaagacctaaatgatataattaagatgttaatttcagaggaggcgtactatggctgtaaacatttatgatactgcaaaccaaatggaacaagaaattcgccaaacaagtgagtataaaagcttgcaagaagcttttgctgaagtacgaaaagatgaacatgctagtgtgttgtatagcaaatttcaggatgttcagagtaatcttcaacaaaaacaaatgaacggtgaagaactaacagaagaagaaatcaaaaatgttcatgaaattgcggatcaaattgaaaaagtagatttgattaaggatttaatggataaagaacgtaatatgaaccaattgtttagcgatgttagtcaaatcatcgttaaaccaatccaagaattatacaaaaactaattaattgcacgtgacaatctttttgttatgacgctgtgctataaaaaattgggactgtaagacaaaaaaatgtcgcagtcccattttttagtttctgggaaagtagaggaaaaatatgaaatttattcatgcggctgatatccatttagggagtccgtttcaaggattaaaaaatattccggctaacatccgtaaacgcgtggttagttcgaccggggtggccatgaaaaacttggttcaggcagccattgaaaatacagtggactttgtctgcattgcgggggatttatttgataatccggaaccggatttggaaactttaaaccttgccatcgatcaactagaaattttaaatgctgcaaatatcccagtatttctaagttatggaaatcatgattatcttaatgctaaaatacctggagcaatttttccggataacgtaagtatttttggagaagaagttgaaaccaaacaaataacgttggtagatggctcaacggtggatataacaggctttagttataataaacgcgcagaaattaatgctcggattgaggaatatcctagcaaaaataaccaagctgatttccaaattggaatgttgcatggaagtatggacggtctaaaatcgagcgaagcccactacgcaccttttacaatttcacaattgttagctaaaaactatgactattgggcattagggcatattcataagcgacaaactttaaatgatatgccggtcattgcctatgcgggaaatactcagggacgtcatattaatgaacccggcccccgtgggataagtctagttaccattaaccaacaaaagcaaactgacgtccaattcttaagaaccgatgttgtagaatggtctaatgtagcagttcaagcgcaaaaagggatggatttacaacaaattatttcagcgattattcaagcggtcgaacctttagcagcgcaacaacttaaattagttaatattaacctacagaatagtaatgttttaacaccagaaattttagatgaacttaccagcggaattgttttaactcaaattcaaaaacaattagaccaagaggtattttgggtttatcgaatttctttgaaggttaataataatattcggattttttcagaattagaccaagcgtactgggaaaaagcgaccgccaatgtttttaacgaaaaaaaagttcaagaaaagctcggcaggttaatggaacttgattttatagcagaaacctatggaaatgatttagaacttaacccgttgaaagaccaagttgaactaatgttgaaacaacggaatgctcttggagacgaacgcgatgaaaattaataagattgagatttatggatttggaaaatggaataacgttattttcgatttgaaacaagatttgcaagttttttatggtttgaatgaagctggtaaatcaacgctaagacaatttatttatagtattctatttggttttgctggtggtcgtggtaatcataagtatttacaatatgtacctaaaaaagcacaaggtgcagcaggttacggaggcaatttggtagtagaatatcaaggaaaaacttaccaaattgagcgaattaaaggtaaaaatggtgggaaagtaaatgttaaaaatatggatgatggactcgaaatgaatccagaatttttaacagagatgcttggccccattgaccaaaatgcttacgaacggttgctgggatttaaccagagtgatttggacgacttcaatgatttaggcaaccgggatgatttacgaagacatattctgcgaatgggcgcagtcggaagtgatgagtggattaagctcgaaaacgacttaaaaaaggaagcggataagcttcatactgccagttctcgaaaacgagacctagatcttaaaatcaagcaatataaagaagctgttgatcagcttcaagctgataaggccaaactaccagattatcaggtaacgaaagacttagaagaagccagtcaacaaaagttgcagcaagttcggtcggagattgcaaaattaaatactaaaattacagaaaccaataatttgattaatacgtggcctacatattcagaaacattggatttaaagcaaaagctgcaagatatccccgaagcatacttgaatttagatttgaatcagttggaagttttagccaaccagatacgtgaaaatcagaatgaacttcgtaatttacaaagtcagctagaggatttaccaaatgagaaaaacaatgtaattgatataactaaattagacgaactacaaagtaagctaccagaagtaaaattgaattatggtcagttagaggacttgaaacatagattcaatcgattgaaccaacaacttgaagaaattcaagcgcagtatcaagttgaccttggtaatcttaaacccatgccagaaggtcaatttgttgaattaaaggacttattgttaaagcagaaacgtaagaatgcggatattaatcaacttaaaacacaaatgttagaaactacgggaagtcgttcaacgcatacgaattctaattccaatgtagtaattggcgcagccgcggtactggtcgtaattgattttttaatcccattaaactggttatttaagttgatcttgctagcaataattattggtggtggatatggtttaacccatgctaaatcagcagacaacgttacacctaatgaagagaatttagaagatgttttgaagcgggatgaaaccgaagctgagcaaattaaaactgcaatcaagcaaattggtgataaaacaagctttaacgcatttccagtggaagattgggtagcattacaatctaacttattgaactaccagcatttggttaatgaaatgagcgaattaaagggacatttaacccaaatcaaagaacaacttggcactttttgggaattcagcgatggaattctcccagtggatgaacatcgaaaagaagctctacaaactttgatcgatcaggtaaatggaatggttgagcaagatcgaaagcaacaaagtatcagccaacagcgtcaattacttaataaaaatgtggcggaacggcgtaccgagttagataaattgcgaattcaatttaaacagcttaatggacctgaaattaatgctgattttgatgattggcttaagcaagttagaacagcccaacatttaaacttaagattaaatactttattggaatctaaccaagttaagttttttgaccaactacaacaatatgcagatttaacaaaattgcagcaacttcaaaacgaacaggaacaaaagctggccgagtttaaacaagctgagcaagatattttagaccaacgtgctaatcaactaggtgaacttacgggtcttaagagtagtgtagacatcctagctgaacaacagttactatcagaacaagaaaccgaaattaaagatctggtttcagaatggttaactttgcagctaggtgctgaatgggtcgatcaaacactaggagtagctactaagggacgtttaccggtaatccttgataaggcaaatgagtactttagacagataactaatcagcgttaccaaaaaattgaatttgataaagatgatatgattaatgtaacggatgaaactggaaatgtatttgaaattggtgagctgtcaaaaggtacgatggaacaactttatatttcaattcggtttgcctttatgcaagcttttgcggatacggtaagattaccaattatcattgacgatgcttttgtagcgttcgatgatgttcgtttacgacaagcctttagtttattaaacaaaattgcagaacaaactcaagttatttatttttctgccaagaaagaagtttatgacttaattgatgaccaaaaaattattaatttaaatgaaaaataaaagggggagatattttgacgaaaaaaataaccgaatttcaaaatgatgaagaaatggaattatttgtcttaatcaaatctgcggaaaagcgggtgaccaaagctggaaaagattttatttcgatgaagtttcaagatcgatctggagacattcatggaaactactgggatgctaaggaagaagattttaaaaatttccaacctgggcgagtagttcttctaagaggaaaaagagaaacttataagaatgctccacaagtaaagattatggcgatgcgtttagctaccgatgaggaaccaaacgatcctactgcttatactgaaaaaggaccggtttcagctgaaaaattgcgagaagaatttacacaattgatgtttgaaatcaacaatccagattggaatcgagtggttagatatttattgaagaagtatgaccgcgaatttttcagttttccagcagctaaaactaaccatcatgcttttgagggtggtttggctttccacacactttcaattgttaatttagctaagtcggttgctgctcaatatgaacaagtagatcaatctttattaattgcgggagccatcctacatgatctaggtaaaacaattgaattatcagggcccattgcaactcagtatacggttgaaggcaatttgttagggcacattgtcattgtcgacgaggagattgtggaagcagctaaggatttaaaaattgatccgagctctgaatcaatggtggtattaagacatatgattgttgctcatcatggtttgaaagaatatggttcaccagttgaaccgcacatgctggaagcagttattttacacgcattggacgaacttgatgctgaaattcaaatggtatctggagctttgaaaaatacacaacctggagctttcagtgaacgaatttttggtatggatggacgtaatttttataaaccagaaagcaaataaaaaagatgaacgagaaatcgttcatcttttttatttagcattatttagtacttgagctagcagagctaccaaggtaatcgtcaagaacattcttaaggtctttgtccttaatagttacgttacccttcttaagaactttagtgattacactacgtaaagttgtgctatcgctcatatctgcattccagatacgttctttaagttctttagtatggtcagacatcttacccttagatggtttgttaatcatcttaatcacttggtaaccatattcagttttaactggtgtagttgtatatttaccttcatcaagcttgaatgcagctttcttgaaagaagagtccagtgttgagtttgtgtcatcaaaggcagcaattttaccacccttattcttagttgaagaatcagttgaatattgcttagcaagtttagtgaaatctccaccatcgttaagcttcttgataacatcttcagcagttgatttcttagaaactaaaatctgagccactgtaacctttggttcataagatttccattctttcttaaggtctgcatttgaaatcttatcgttagctttaacggcttctttcaatagcaggttagaacgaatctgagtcttcaaagaagaagttgtcataccattagatgaaaggatgctcttaaatgatgatccatattgatccttgtatgagttgtattgcttagtaaccgtctttttagaaactttatcaccatattgtttttctaaaactttgttgacgatcatttcttgaagaacttgcttaccactagtggtgttcttcaagctgctgtagtattcgtcttgagtgattttaccacccgatgttgtagcaaccgtcttatttccacacgctgctaaggtaaatgccattgcaatactggcaaaaccaattaaaacttttttcattacaatccacacatcctaacaatttaatttgttaaatacaaaacctatcataccatacctaaatggatgataataaaacaactttaatctttagaaaaagttttaatcattttctttttttatccaagatttggtcttgtaaatgatcaatttcgctatttatgtgtttttttagttcattaattttttcaatgcgagggtcgagtttatattcaaaacgatccaccgatttagtaatttggttaaccgttcgctcagctttttttaattcaacttggagttgagccgagttagcctttaaactttgaagtgagtcaacaaattcacttaaattggtaaagtattccttcatcgatattttaaaatcacggatgaaatggggatggttaagaagatattcgacacctttaaaaccagcccaagttccgatggaccactttaaccatgaatgcttcttagttttttttgccataattaatcacctaaacgatcagtaatctgtttttggattttttgaagttcctcagaactgtatttatcggtgttatcagtaaaggtcatgctgaaaccatcatccttggtataacgtggaatcaaatggaagtgagagtggaagacactctgataggctaattcgccgttattattaaccacattcatggctttaatgtcaggattgctagccttgatggccgttgcaatcttaggaattctggagaagacgtctgctgccagctgggaatcataggcaaaaagatcgggaacatgttttttaggtaccaccaaagtatgtccaggtgttacttgagaaatatcaagaaatgctttaaccacgtcatcttcatatacagtataactaggaatatcgccagtaattattttacaaaatacacaattttcatccattatttctacctccaatttataattaattatacatgaaaaaggagggaatgtatcatcatagcaatatggttaaagaccgatatgttataatttatggagattttcaaaatcttttttagacgattggggatttaaatttgacactatcaattgagcacttaacgggcggttacacacaaacgccagtcataaaagatattaattttgaagttaaaaatggtgaattactaggattgattggtctgaatggagcaggaaaatcaactacaatcaatcatgtcattggattaatgcgtcctatgaagggtaaaattattttagatgaaattgatttggaacagaatcctactcaatataaaaccaagcttgcgtatattccggaattacctattttatatgatgaattgacgttgaaggaacatattgaactaacgattaaggcttacgaaatgaattcagaaaaagcatggcagcaagctcataaacttttaaaaacctttcgattagagaataagctagactggttcccagctaatttttcaaaggggatgcgtcaaaaggtgatgattgtttgtgcctttattactgacgcagaattatttgtagtcgatgaaccttttctagggttggatccgctagcaattgatgaccttttaaaggtgattaatgaaaaaaagcaacaaggagcttccattctaatgtctacgcatgtcttagacaccgctgaaaagtattgtgatcgctttgctctcttaaatgaaggtgaattaaaagcggttggaacgttagctgactttcagaaacaatttaatttaccgaactctagtttaaatgatatttatttaacaattgctaagggtgagcgcgatgaatgagttatggaacagtcgaactaagcaatatcaaaaaatgatcatgcgatatttaaaatatgtattgaatgatcatctggttttagcgttgctatttttcggtggtggaattggtttagcatattcgaattggttaaaagaaatccatccaggaacctggtatatcaaacctttggttttaattggaggcgttttgctaactttactaggtaaccctgtcctcctactaaagctgccggataaagttttcttggttcctaaagaaaaagatattcatcaatatttagggaaatcggtcaaaagatcattaatctcagtggtattgccaactttgattggtaatattattttatttccattattagcattggaatatcaccatgttgaagcggcggtagccattacggttactattttcttgggaagtatggcaaatgtcttgagaaaatatcaaactctatactttgataccagcctttcacaaatgtggtttcatttggtagtgatgttgattgctgtaggactaggtgtttggtttagtccgatgggtggattaatattaatggcgattaatttgatttttagagttgtacttttgaatcaggttttcaaaactaagcggtttaactggaatcatgcaattgacttagagaatagtcgaatgcagcgcttgtatcatttcttcagcttgtttaccaacgtcaagcaggttggtgcagaagttaaacgtcgaaaatatgcggatggcttggttcatattttatctgggaaaccaaccttgtttacttatttatatcctagaataatgattcggagcggtaatcaagggagtttgatgttacgtctattactattagggatggttattgaaggttatagtcagcagattccgttaaaggtaattgttggtggactaacaatctatttaatggttatccaaatggtagacatttatcgtcccgttcacgaaaatgtatttattaagatctatcctgttagcccagatgcagcagaaaaagacttgttatctgttatgaaaagaatcatacttataagcgcgatatttttaacattaattggactgataagtaacttatcatggaactttttagttgcatcggtggtaacacaggggattgttgcagtgattttactcaagtggttcataccacgttatataaaaaaattaaattaaatttaagaggtaattatgcgagttagaaataaaccatgggcaccggagttaatcgaggctcatccagaaaagattgttgaaaagggccaagcgttcaagggtcaatggaaccagcggtttgaaaaagaacaaccaatttttattgaagtaggaacgggtaagggtcaattcattattaatatggccaaaaaatatcctcaatacaattttattggaattgaaattcaaaaaactgtaattgccattgctttaaaaaatgctttggaggaagaaattcccaatttgcaattcttatatgctgatggcgctgaacttacggattattttgaagatggtgaggtttccaaagttttccttaacttttcagacccatggcctaaaacacgtcatgaaaaacgccggttaacctttaagactttcttgaaagtttatgaacaaattttagttaaaaatggggaagttgaatttaaaacggataatcaaggattattcgaatattcactttacagccttaataactatggaatgacttttgaaggcgtttggttagacttacacaatagtgaagaaaacgaagataacgttgaaactgaatatgaacataaattcagtgctaaaggccaaccaatttacaaattaaaagcacatttctaaagtgaaaaataaaaagagtctgaggatttttcctcagactctctattagtttgctattatcgacgataaatatcgataatggtaccagtataggcatctgcgataaattcgtactgaataagttcattgttttcgtacttggtgattccaccataataaactgaagctttaaggccatagcgattaagaggagacggctttgattcaatccaagcgccctcaatggggccatcgtcttcaaaagaacgtcgtacccgagctaaggcagattgtggtcttactttgcggtgttccttgatttgatatgtaactaatgaacccagcgcaaaagttccgattgcggtaagcgttaaaccgagtaatgcagatgatttagatgacatgaaaccacttccttttctactaattctaacattagtaagaaggttttgagaattaaaaagtatatattttaaggagaaaataatgttaattgctagttataataaagaaaccatgggagatatcctaattacgatgattcgtccagatgctgaggaagcaaaaattgaacaaaaaggctccgtagttcgaattgccaatgctaaaacaaatgaaaccaccggttttaatttcttaaatgtcagcaaaatttttgaaatcaatggtaagggtcccattactttgactcaagaacaagtaaagcaacttaatgccacattatctgctaatggttttgaagctgaattagtagcagatgaacgtccaaaatttgtcgtgggttacgtgaaatcaactaaaccacatccagattcagatcatttgttaattactgaaactgaggtggataatggtgaaactttgcaaattgttagtggttcacctaatatgaccgacaatatcaaggtagtagtagctaaggtgggagcaatcatgccagatggaatgattatttggccaggcgaacttcgtggcgttgaaagtaatggaatgatttcctctggaagagaattgcatttaaataatgcacctcagaagaagggagcattaattttacctgatgatttcgttgtaggtgaagcatttgattttgaaaaaggtaatcatatctttgattaaagaagggatttagatggttaaatatgatgggcctgctttttttcgaaaaaaaggcgtagattttaataatccaagtttaaatattcaagaagaccaaacttcgaagttaaaaaatgaggattttacccctgctattaaacggcgtaaacaggttccagagaccatttcccaagcaaaattatcgcaggcggtagatcccattcaaccaacgttggctaaagatacacctgaaccaactaaacaagtggtagagaaaactgagcatcgacagcctcgttttagaatgccccgtacaaaatatgaggcaccgaaacgtccagcaaaggttatgcatgaaattaagcatcgacaccagcttgagaaaagtcatcatgaacttgatgaaaatattacaccggtgatagaaaaaaacgtaccgaaaacgatggttgaaaaagctgtcccaattgaaaataataatcactttgaagagcaaccgccggaagaaaatccaaggcagtcatttgaacgaagtgaaactaatgaattcgggtatcaatttccaagtttgaatttattacctaatccagtaattgacactgataatacggacgagtgggttaatgatcaaattcaaagattgaatgatgccttattagcgtttgatgttgatgctgaggttgtaaattggactgtgggcccaacggtaactcaatttgaaattgaactcggtcgaggagttaaagtcaataaaatcacgaatttaacggatgatttaaagctgcagttagcagctaaggatattcgaattgaggctccaattcctggtaaaaataccgtggggattgaagtacctaatttgcatcctcgaccagtgcctttaagtgaaattattagttcagataagtttaaagcaagtgagtcaccattaaccgtggctttgggagttgatttgtttggtcaacctcaaacttatgatcttcgcaagatgccgcatggtctgattgctggtgccactggttctggtaaaagtgtttttattaatagtgttttggtgtcgttgttatacaaagcgactccccaagatttgaaactactattaattgatcccaagacggttgagttagcgccatacaatggactgccacatttgcttgctccagttatttcagatcctaaggccgcctcggcttctttaaaatgggttaccaaagagatggatgagcgttatgaaagactggcgactgcaggtgctcgcaatattgagcagtataataaaaaggccgaaaaggcccaagattatgccaataagatgccgtacattgtagttattattgatgaattagctgatttaatgatggtttcttcttcagaagtacaggattacattgtacgaattacgcaaaaagcacgagcagctgggattcatttattgattgcaacccagcgacctagcgtggacgtagtaaccggattgattaaaaataatattccaacaagggtagcgtttatggtatccagtcaagtcgattcaagaacaatcttggatcattcaggggcagagcgactcttaggaagaggagatatgctgttccttggaaatggaaagagtaatccggttcgtctacaaggggcctttattaatgaagaaatcgatgacattactgattttgtccgagcacaggctgcgccacaatatgctttcaatcccaatgagttgaaagtccaaagtgaagagttggatagcgaagacgaattaatggatgatgtacttgaattcttagcggatgaggaaactatctcaacatctaaattacagagaatgttttcaattggatacaaccgagcagcaaccattatggatcaacttgaggcttcaggatatatttcggaagctcgtggttcaaaaccacgggaagttttttatgatggaaacaataacgaagtgtagtgtggtaaactaaaaacaatttaattataggagtggtaaaggtggataaagattcaacttattattttatcggtattaaggggtcagggatgagttccctagcacttattttgcatgacgagggatacaaagtagaaggatcagatattgagcaatatacctttacacaaaagggcttagaagctgctgggattaagatattaccttttgatccggccaacctacgtgaaggcttgacggtgattgctggaaatgcatttactgacgaacatcctgaaattaaaaaagctagagcaatgggtctaaaagtaattcgttaccatgaacttctgggacaaatgctagacaaatacactagtattggtgttgcaggaacgcatggtaagactagtacaacaggattgcttgctcacgttttaagtggtttagacaagactagttatttaattggcgatggaaccggtaagggtattccagatgcacgattctttgtttttgaagctgatgaatatcgtcgtcattttattgcataccatccagactatatgattatgactaacgtcgattttgatcatccagattattataaggatctcgccgatgttgaaagtgccttccagcaggttgccgatcaagttcataagggaatctttgcttggggtgaagatgaaagtcttcgtaaaatcaatacatctgttccagtttactattatggaactaaggaaaatgatgacttccaagctaccaatattagtcgaacaaccacgggttctgaatttgatgtaatccataagggtgaaaagttaggtagatttacaattaacctttttggtgaacacaatgtgctaaattccttggctgtaatcgcagtagcatactttgaaaaagttgatttggacctagttcaaaaagaacttttaacttatcaaggtgttaaacgtcgtttctctaaggaagcagttgctgataatattttaattgatgattatgcacatcatccatctgaaattaaggcgacattagatgcagctcgccaagaatttcctgataaaaaaattgttgctgttttccaaccacatacttactcaagaactgccgctttgatggatggctttgccaagagtttaagtttagctgatcaagttgttttaactgaaatttttggttctgcacgtgaagatgccggggctgtttcatcacaagacttagcagataagattggtaataataccaaattgattcatcaagatgatttatcggctattagtgatttacacgatgcggtattggtcttcatgggggccggagatattactaagtacgaaaatgcttacaaggcattatttaaataattattaagttttgatttgtttgactaattttgacctataacattagccatttgggtagcttcttgttacaatgtggtaaataatcgaatgggggaattagattggatcaaagaccaaatgttattaatacagaaataggattaaatcgatttctaacaaagatgtacggatggatggcagctgctgtagccttctctggagtgattgcttacctaggagccacaatctggcgaccagccgtaatgactttcctttctcaaggaagaatgagtatctgggtaatttttattgctttgttcttgtttatgatttttggacaaaaggcggccttgcagaatccaacggttagtttcttaatgctatttgccttttcggcattctttggaattacgttgtcgagtgtctttatgctttatagtaccgctactattgcgggggcatttttctcagcagcatcggttttcattgtaatgagtgtgatgggagtaaccacaaagcgtgatctatcaaggatgggtaaccatttaattgcggcattgattgcgatggtggtagtttcagtgattaatttattcttccttcacagttcagccgtaactttcttcttctcaattattggaattgtgatttttgcgggtttgtcaatgtatgatactgcaactatgaaacgtctttacctgaactatggtgaccaagtttctgagactggacttgcaatccaaggggcatttagtctatatctagactttattaacctcttccaatacttcttaactatttttggatggaatcgagactaaataaaaattttataaatacaaataaaccgaaggtcaatctttttcacgttgaccttcggtttttggtatcattaaagaggatagaaaacggaggaaattatggcaaaagataaacttttattgattgatggaaatagtattgcttttcggtctttttttgcgttacataattctttaagtaaatttgtaaataaaaatggattacatactaatgcaatctttggtttcaacaaaatgttagatagtattttagaacaataccagccgacagcggccttggtggccttcgatgctggtaaaaccacttttagaaatggaaaatttgataattataaaggtggtcggtctaaaacaccacctgaactatcagagcaaatgccttatttacgtgaattacttacaggatatggaataaaatcttacgagcttcctaattatgaagctgatgacattattggaacacttgctaaagaagctgaagcccaagattatgcggtagttgtggttacgggagatcgtgacttaacccaattgagtagcgaaaaaacaatcgtcgccgttacgaaaaaaggggtaagcgaagtagaagagtacacaccagcgtatgtcgaagaaaaattaggcgtaacacctaaacaaattattgacattaaaggcttagctggagacacatcggataattatcctggggtaactaaagttggtgaaaagacggccattaagttgttaaaacaatttgattcattggagaatttgtatgagcatcttgatgaattaaaacctagcaagatgaaggagcatttgattgaagatcgagacaatgctttcatgtcaaaagatctagcaactattagacgggatgcaccgatagaaatttgtctcgatgatgtgcagtatgtcggtattaacgaagaatatttgagagaattttaccaccaaatgaactttaagtcctttttaagtaaattagatcaaacggcaactcaagatggagttgaggccgtgaaaaaagaggttgtttttaacgttttaaataaggacaacgtggaacaactccaatcattaaagggtgaaatcgatttttatttggaaatgttggacaaaaactatcatttgtctgattttacgggatttgtgatcggaaatgccgataacatttgggttagtgatgatgtagaactgttgaacaattcaaaaatcaaagctattttggaagatcccaaaattaagataaatgtatttgatagtaagcggacgtatgttggcttacatcgactagggattaagctaacggcggttaactttgatatattgcttcaatcgtatttgttagatactaatgataattctaatgacctaggtcaacttgctcatgagcatgattacgatacgattgatacagacgatgatgtttatggcaaaggcgccaagcgtgcggttccagagcaaacagaattgtttaaccaccttgcacgtaaattagcagctattaactttttaggtaaacaattggaccaagaattagtaaaaaatgaacaaaataatttatattgggatattgaattaccactcgcaattgtattagccaagatggaaattagcggtattaaagttaaccgcaaccgcttaaatcaaatgcaaagcgagtttactgaacgcttaagtgaaattgaaaccaatatttacaacgaagcgggagaggaatttaatcttaattcgcccaagcaactcggagtagtgctgtttgaaaagttaaaattaccaatcattaagaaaactaaaacagggtattcaactgcggtagacgtcttagagaaattacaaggcgagtcaccaattattgataatattttgaactaccgtacgctttcaaaaattaaatcaacttatgttgatgggcttttaaaagtaattcatacgactgatgaaaaagtgcatacaacctatgtacaaactttgacccaaacgggccgactatcttccattgaccctaatttacaaaatattccggtgcgcattgaagagggtaggaagattcgccaagcctttgttccagctcgtgaagggtggcatattttatcatcggattactcacaaattgaattacgtgtattagcacatattacaggtgatcagaacttacaggaagcatttaaaaatggcgaagatattcatgctacaactgcagttaaaatatttggattgaaggatgctagcgaggtaactcctaatattcgacgtcaagctaaggcagttaattttggaattgtgtatggtattagtgactatggtttgtctcaaaacattggaatttctaggaaagatgccaagaaatttatcgaaacatactttaaggaattccctggtgtaaaaaaatatattgatgaatcagttcagttagctaaagaacaaggctacgtagaaacaattgcgcaccgtcgacgttacttaccagacattaattcgtctagttttaatttacgttcatttgcggaaagaaccgctatgaatacgcctattcaaggtagtgctgctgatattattaagattgcgatgatcgatatgcaaaatgaattagaaaagcgtaacttgaagagtggaatgttactccaagtgcatgatgaattgatttttgaagttccggatgaagaaatgacgttaatgaaagaattagtaccgaaggttatggactcagcagttaaattggatgttccacttaaagttggagcagcttggggaaatacttggtacgaggctaaataacgggggagaagtatgcctgaattaccagaagttgaaacagttcgtagaggcctagcagccttagttgaaggaaaaatagttactaatgttgtagtacgttattcaaaaatggtctcaccaaaagcggaaatttttgcagaagaactagagggtaaaaaaattcttaatgttcgacgacgcggcaaatatctattaattgattttagtggagattacacgatggtttctcatcttcgcatggagggtaaatactctgtagttgatcgtcatgaagagtatggcaaacatgatcacgttattttcgagcttgatgatggaaaagatcttcggtacaacgacactagaaaattcggtaggatgaatttggtacccacgggtgaggaattacaagtgggcggtttaaaaacgattggaccagaaccaacgcctgagacccttaccttagaatatttaacccatcagctacggaatcgaaaacgtggaatgaaaagttttctattggatcagtccatgattgctggtttaggcaatatctacgctgatgaagtattgtggctaagcaaaattcatcctcagcagatttctaatactttaactgatgaagaaattgaaattttgcgtgaatcaatttttgaagagttgcaattggcgattgaagctaaaggaacgacggttttttcttatttgaatgcggatggtcatgcgggaagttttcaaaaccagttgcatgtataccatcgccaaggtttgccgtgtcagcgatgcgggacacccattgaacggattaaagtggcacaacgtgggacccatttttgcccccattgccaagttttgaggtagtgatatgacagtgatagttggtctaactggtgggattgcaatgggtaaaacgacgattagccaatttttgaaatctaaagcaattccggtagttgatgctgatcaaattgcacacgaaatcttaacagttgatgaagttaaagtgaaattgatggatacttttggtgaaagtattctagataaaaatcaaaatattgatcgtcgaaaactaggaccaattgtattcaatgatcaaagacaattggaaaagctaaatataattgtgcaaccttatattcgaaccgaaatagtaagacaattggacaattttagcgcaagtaaggtagtagttttagatgctccggtgctctttgagcaaggatatgaaaaaatggttgattatttaatggtcattaaaactagtgctcaaattcaagtagaacgtttaatgcaacgtgatagtttaaatgaaattgacgctcaaaaaagaattcaagctcagatgcctatcgaagaaaaggtaaaaaaagctgatattgtgattgataccagtggaacaattgaagagacacgaagtcaagtggtaaaatggcttgttgacaagaatttattctaagcttccgaagcattcggcgaggtgaaacgaaatgaaatgtccacactgtggaaataatggatcaagagttgttgatagtcgaccaaccgatgaaggtcgggttattcgacgaagaagagaatgtgaaaaatgtggctttagatttaccacgtttgaacgtgttgaagcaacaccattactagttattaagaaaaatggatcaagagaagagtttgatcgagataaaattttaaaagggattgtacgagcagctgaaaaacgccccttaaacatggaacagatgacggatatggtcgataaggttgaaaataaggttcgttctttaggtgagagcgaaatttcaagtcaaattatcggcgaatatgtgatgaatattttagtagatttagatgagattgcttatattcgttttgctagtgtttaccgtcaatttaaagatatgcatgtctttttagatgagctgcaagatatgatgaaaaaagacgaagaaaaggaaaaagagtagatggcaactgagatgagtgaattagcaccccatgattcatttataattgatagccaacgtcaaattactgattttgagcaacgttcattgacgacactatatcgtccattgttgacctcagatgcatatagtttgatgatggttttgtgggaaatgagtcaggaaacccaatcgatctcagaacagtacacacatacaatccttttaaattggcttggaatcgatctaccagcgatagttgaggcacgaggacgtttagaagcactgggtctactaaaaacgtatcagagaaaaattgatcgtcgaagtttatttttgtatgcactccaagctccagccgatcccgttaaattctttaaagatgacactttgagtgctttattgctgggcgtgattggcgaaagtgaattcgatcggctgagtcatcggctgattaagcagcacgtgcgtcaggacgaattttatgatgtttccaaaaagctgggcgactattttcaattgggaagtagcgtaataaataaaccagatgcaattaatcaggttcagaaaagtttatcggaaaccgagcatgaagttgatacagaagttattaaccaagattttgattttaaattacttgcgcaaatgctaagttctagttttgtagatcatcagagcttgctagaaaatgaacatttaattatggttgaacagactatttatgggattaatgaaagcgaaatggctcagttaatcaaagcctctacgagttatgaagataacaaaattgatcctaaagaactaaagtcacgagttttgaacgcttataatgggcagacgccggttaaagatgatggaaattctcagcctaaaaacgagtcaattccgaataatgcactagctaaacttactacagaagaacgcgccattattagtgcaacctatgctatgtcacccaacgcatttattgaaagtttgaaagcacaagcagggggctttacaactgctgcagaaaaaagaattattacagatttagttggtaaagggttaatgccaattagtgtgataaactttttagtttactattttattgttgatcagggtcgacctacgttaaataaaaatttagtggaagcaattgccaatgactggattaaaaataaaattaaaactccagtggaagctttagaatttattcgtaaacgccaagaacaaaagaaaaatacgaacaataattattcgaaaaatcggcgtacgattcaaagagaaaccttacctgaatgggctacggagaccgctaagactaaagaacccaagcaagttaatccagaaacaactaaaaaaattaatgaacaacttaaaaaacttcgttctagaggcaaggagggatagtcatggaaaatgtccgagaaattttgcaagaattaatgagcaaaagaaagctcgaccagcgttttaataacgtgatgaaatcagtatattctgatccagaagtgattagtttttgcgaggagcatcaagacgaactatccaaggaagctatcgaacgtggagcggctaagctgtatgaatttgtttcagaacgaaataagattaaaaataaccaagcaacctttttaccgggatatcagccagaattagtcttaagcaatcatttgattgatattgagtatgtgcccacgaaacagactcatttattagaacaagaacgtcaccgaaaagcgttagttaaatcgattagtatgcctaaattaatccgtcatgcttcattggagggatactatcaggaaccagaacgaacagacgctttggctaaaactttagcgtttgtaaacgaatatttagaacgccctcaagattggcataagggtttgtatttgacgggaagttttggtgtgggaaaaacgtatctaatgggtgcaatggggaacgctttggctgatgaaggatattcgacaactattgttcattttcctagtttagctgttgaattaaaaaatgcgattggaagttctaatacgattcaaactaaaatcgatgcgattaaaaaagctccgattttggtaattgacgatattggagcggatagcatttcttcttggattagggatgacgtattgggagtaattctcgaataccgaatgcaagaagaattaccaacattttttacatctaatttttcaatggaccaattagagcgagaacatctaacagtcaatcagagaggcgaagcagaacctttaaaagcgaaaagattgatggaacgaattaaatttttgagtgaggaagtctcgatgacgggaaaaaatcatcgacaggattgacaaacaatcaaaaataggtagaataaatgtataaatcacagtcaaacatgtagtttttaattcagggagcggagccgcgactgcaagcgatgcacttaaaacttcccacttgactagaggctgggcgcaatcccagttcggttgccaccgttatggcttttaatcgagtggtagatagttttttaactgtctacaattagggtggaaccgcgtgaataataaatgacaatcacgtccctggtatttttataccagggacttttttgtacataaatttaaggagagagtgttatgacagaaattaatattgaatttccagatggcagtgtaaaaccttttgaacaaggcgtttcaattttagatattgctaagtcaatcagtactagccttgctaaaaaagctgttgctgggaaaattaacggtgccttggttcgtttggaccaagctattaacgaaaacgtaaaaatcgaaattgtcacaaaagattcagaagatggtaacatcgttaactggaattcggcagccttagttttgactagtgctatcgaaagcatctatcctggagttcattttggtgagattggcaacggagaacatggtttttacgttgatacagataaggttgatcaacaaatttcagttgaccaattaccagcaattgaagataagatgaaggacattattaaatctaagattagcttaaagcatagtgaaattagtgtagaagaagccctagcaagcgttgatggtgacccataccaagctaaaatcgttaagcgtaacgaaaaaaatggcaaagttagtgtttatgacgttgatggaaaaataattgttagtgataacgttgctttacttagcacttcagatatgaaagccgttaagttgttgtcagttgcaggtgcttattgggaaggtaagtcaagtaatccgatgctccaacggatttacggaacatctttctacaaacaaaaagatcttgaagcagaacttgaacgccaaaaggaagctcacgaacgtgaccaccgtgtcattggaaacaatttagacttgttcttcgttgaccctaaggttggtgcaggacttccttactggatgccaaatggtgctacaattcgtcgttccattgaacgttacattattgataaggaagttaagcatggttaccaacatgtttacactccagtattgatgaaccttgatgcatataagacttctggtcactggcaacactatcgtgaagacatgttcccaccaatggacatgggtgatggcgaaatgcttgaactccgtccaatgaactgtccttcacatatccaagtttataagcaccatattcgttcatatcgtgaattaccaatccggattgctgaattagggatgatgcatcgttacgaaaaatccggtgctctttctggattacagcgagttcgtgaaatgacgttgaatgatggtcatacatttgtggctccagaccaaattcaagctgaatttaaaaaagttcttcaattaatggttgaagtttatcgtgatttcaatatcactgactacacattccgcctaagttatcgtgatcctgctaatactgaaaagtattttgacgatgatgaaatgtggaacaagtcacaatctatgttgaaagctgctatggatgatcttggcttagattatgttgaagctgaaggcgaagccgcattctacggtccaaagcttgacgttcaaactaagacagcccttggaaatgaagaaacactttcaacaattcaattagactttatgcttccaaagcaatttgacctacattatgttggggctgacggggaagaacatcgtccagtaatgattcaccgtggattagtttcaactatggaacgtttcacggcttacttgattgaaatgtataagggtgctttcccaacttggttagctcctaagcaagttacaatcattcctgttaaagatgatttacatggtgcttatgccgataaacttcgtgaagaaatggtcgataaagacattcgagttgaagttgaccaccgtaatgaaaagatgggttataagattcgtgaagctcaaactcaaaagattccatatatcttagttgttggtgataatgaattagaaaataactccgttagtgtacgtcactacggtgaagatgattctaagaatgaagctagtgctgactttatcaacaatatcgttcgtgaaattgaaagttacagtcgcgaaaatgactaaaatagtttaattaaaataggatttttaatggtgtgaatatcattaaaatcctatttttttgtaggctttaataagggatgaccgttgaaaggcttataattatattgtgattaagaatggtagttttagaatgattaatgtaaggagtaggcatgttaaatttaaccgtacttttgtttgaaagagctggattaattattattttggctttttttctagtaaatattcctcaatttaggaaattactttttcgaaaagattggtcaacaactttccaattatttgcgattttttctgtttttacgattgtagcaaatttaattggtgttgaacttcgacctgataatagcattcaattcaaatcccttctgcagaatgttacccctggagattctgtagctaatattcgaattttaacggttacagtttcaggaattattggcgggccgctggttgggggtggagtaggcttagtcgctggacttcaccgaatgttgcaagagtcgctaacaaccgacgcccttttttgtattcccagttcgatgataattggaattttagccggtttttttgctaagaaaaaacaacatcgctttgcaacaatgaaagtgtttgatggttttttagtaggacctttaatggaagcaatccaaatgctgtttattttactatttagtccgacaggtaggactttggtaaaatatattgcaataccaatgatgctagtaggtgctttagggacttcggttttcttatcaattatcacgctttattttcggcaggaagttgatactcaagctacccaaactaaatcaatttttcagttagctttaaaaactttgccagtttttcgccaagggttaaatcaagaagccgctaaaaaggctgctagtttaatattggaatatacaaattttgatgcggttggtattacagatgaatctaagattctggcttttgcggggatgggaagtgatcaccatatcacaggtgcttctatcttgacggaattatctgaagaggcggttaaattgggtgaagttcaaattggaaataatgctcatgagattaattgccctgtaaaaagttgtccattacactcggctgttgtagtacctttaatcattaaaggtaaagcagtaggtagtttgaaactctactatgtagaagaatggcgattaagtccagtggaaattcaattaggaacagggctgggagaaatattagcaatgcagataatgttaggagaaatcgagcatcaatcagaattagtgcgggatgccgaaataaaatctctccaatcgcaagtcaatccgcactttttctttaatgcgataaatacaattgtggcagttatgcggtacgacagtgaccaagcacgtgaattactgatccaactcagtacttactttagggcaaatttaacggggattagagaaacaaccattccgttgtatcaagaattcaaacatgttaaagcctatttaatgcttgaacaaacacgttttccaaatcgatttgaaattttgtttcaccagaaggtttcggaaaatgtaatgatacctccatttagcatccaaattattgttgaaaatgcccttaagcatgcctttaatagtcgaaaaaagggcaatatagtttcaattagtgttgaacagattaaacaaagacttaaaattgaaattactgacaatgggcaagggattgataaaagtattattgataaattaggaaaacagacggtaagttctgtaagtgggagtggaacggcattacaaaatcttaatgcgcgcttgatgggtctttatgggaaagatgccgaactaaaaataagcaataatcaaaatggaacccaggtggtaatccaaattccatataaggaacaggtgtaaagatagtgaagatattaattgttgatgatgagcccctagctcgaagtgaacttgattttttattgaggaataatccgttagtagatagcgttagtgaagcagaaggagtcactgaagctaaacaaaaattaatgacggatcaaccggatctaatgtttttagatattagacttgatgacggaaatgggatgtcatttgcaaaattcttgaaaaaggaagaaaaactacgtccatatattgtttttgccacggcttacgatcaatatgctttagatgcatttgacgttaatgctacagattacatattaaaaccctttgaaaaagatcgtattgatgaaacgcttaaacgagttgatagaattttaaaaaagccagaggcattagttaatagtgatatgtgtaaaaatccgcgactttcggttacagttgatgaaagaacgataattattaaaaagagcgatattctttatttggaagcccaaaatgggaatgtactaatttataccaaaaatttaccattaatcacaagcaaacaaacgttaattaaccttgaaaagcagttagatccagaacaatttctacgagtacatagaagttttctagtaaatttagatatgattttggagtttcaacccagctttaatcatacttatgaattaacattaataaatggaaccaagattacggttagtagatcatatgttgctaaaactaaaaaagtgttaggaattggatgatctaatatttataaattgtagaataagttcatacctattcttagaaattctcaactcaatcgttgaggattttttaattaaaaaccaaggtaactaacacgaactgtatggcattttgaaacaaaaaatggtcacttcatgtgaaagcgctaacataaatgagctaatagcttaaaataaggttgtgataaacagtattagatccataaaggtagggaggaagctaaaatgaaaaaagatgggaagaaagaaacaccaatccttattcaaatgggaatatttatggcaattttatttgtagcacaattactatcgcagttatttccgcctagttttgcagttccgacacccttaattggaatgattattttatatatactattagcgacgcacattattaagcttgaacaggtagaaaaactgggggattcattgattggtttgattgcttttttgttcgtactatctggaattcagttagcaggaagcttagatttaattaagcgtgaaggcttacaggatgtcattgtgacaatcatttcaaccattattttattagttgtaatcacgtatgtaggatcgtttttcataaaattacatcaaaaaataaataatagaaaagaggatgattaatatgacagcagccttggcaacaccttttacaggtatcttcatatcgcttttggtatatttagtggggatgtggctttttaagattagtaaaggtttcttcctatttacaccgttactggtgggagttgttttaggaatctttattttggcattatgggcgaaagggattggctctgcaaccgtggaagtctataaaaaattctttttaccgggtggtaatatagtattttggtttttaaatccagcgaccattgcttttgctattccactttatcgtcaaaatgatatatttaaaaaatattggatagatgtagtgttaactttatttgtgggtggatttatttcacttttcggcattcatatggtttcaaaactatttggactatcaaaagtctccattgcagcaatgttacctcaagccgctacaacggcggtggcaatgccaatagctaagagcattggaggtgaccctgccgtaacagccatggtttgtatcataaatgctgtgattatttacgctcttgcagaatttcttattaaatttttcaagcttaaagaaatttcaaaagtggggttaggtttaggtctaggtacatctgggcatacagttggttctgctaaggcagtgcagttaggttcaattcaaggagccatggcatctgtttcagtagtaatcgttgcattagcgatggatattttagtaccgatttacgctcgtttattcctttgaaataaaagataaaacaaataggttctttagttgacatgagacatagaatttggtattctaataaacgttgagaaaaagcagaggccaccgcttctcgccttgtaacttaagttgctgggctaaagaacgttgaatggatactaattaattatccaaacaaagcgggtggcgtatgccatccgcttttctgcattctcgctaattttcctggaggtgaagaaccatagcaaacgatataatggtaaatgaaaccattcgggctagagaagtccgcttaattggtgtcaacggtgatcaattgggagttaaaactaaggctgaagcaattagtatggctgaagaagctaacttagacgtcgtagtcgtatccccaaaggctaagccacccgttgccaagattatggattatggaaaatatcgattcgagcaacaaaagaaacaacgtgaagctcgtaaaaagcaaaagactgtcagcattaaagaaattcgtttgagtcctacaattgatacaaatgattttaatactaagcttaaaaacgctactaagttcttgagtaaaggtgataaagttcgtgtttcaattcgttttaagggacgtgccatcactcataaagagattggtcgtaaggtacttgaacgaatggctaaagaaacttcagatgtcgcacgtgttgaggttcatccaaagatggacggcagaagtatgtttcttgtgctatcaccaattgctgataaataatttaaaattctggaggaacagattatgcctaaaatgaagacaaaccgcgctgctgctaagcgttttaagaaaactgctaatggcggtcttaagagtgcaaatgcttatacaagtcaccgtttccatggaaagactaagaagcaacgtcgtcaattacgtggtacagacatgatggacagtactaacgtaaagcgttacaagaagttactttcaaacatctagttaagaatttaaatttagaacaaatgaccttcgggtgatttaaggaggaatttattatgccacgagtaaaaggtggaacagttacacgtcgccgtcgtaaacgcgttttaaaacttgctaagggttatcgcggtgcaaaacatattcaatttaaggttgctaaagaccaagttatgaagtctggtctatatgcattccgtgaccgtcgtaatcgtaagggcgaattccgtcgtctttggattgcacgtatcaatgctgctgctagaatgaatggtttaagctacagcaaattaatgcatggtctaaaagaagctggaatcgatatgaaccgtaagatgcttgctgatcttgcagttaacgatgctgatgcattcaaggctttagccgaagaagcaaagaaagctctttaatctattagattaaatgaattaataaataaaaaggattggaacaaaacaatgagttttggaaccaatcctttttatttattttctgaactttaattaaacttcaacgatatatttccctctcggatgatgcgtttgaagagcatgaaaagctttttgaatttcagctacatcgaaatttaagatttcggcaatcgggacggttatttcttgacttgcaacttttttaacaagatattctaaagcggcttggttcattttgtaatctgtgttgtaaaaatcaactaatcttgatgggtcagttttgaaggtgtcaatcccagttgtagaaatcaataaaccagatggagcaaggtgggctaagtaaaggtcggccagctcattttgtggcgcaacgttaataattacgtcataaagacctagttgctcaattgtttttggagcatcgtaaaaaacaacttgattaaaatctgcagtatcgaattgttcagtatacttggagttaattacaacggaaacttgcttatttaaactatttaaaatttgatacaagttagttcctaccgctccagaggcaccaataatgagcacttttgaaaacgaaacgtcttttaatgctccaaaaacgatatcatacgcagtgatacctgcgttgggaagacctgcagccgtccgataactgatttcggcaggaagtttagttgctcgacgataaggaactgaaacatattcgctataacctttgaggttagccaatcccacaattgaatcaccaaggttgaattcggtaatggaggggtctttgtccacgatgatacctgcaacatcactacctggaatggctggcagtgaaattgggcgatacttggcttgagtaccatcaataatttctaaatcatatgggtttagtgcaaaagctttggtttgaacaataaggcgtccactggaaggctctggctttggaacgtctagttcagttaaatctgaaatattaccaaattgattaacaccgattgctttcataatataatcacctcttgtactaaagataatataaagttaagtgaaataaaagatttaagcttgcaagtataggttgctctctttccaaaagagtctactatcgtttataattagacagatagcatttatgggagaagattaatgaatatttttaaaccaacgtggatgattgaaaaaatatataatttatctgcaaaagatttaaaccaaaaaggaattacgactgtcttaaccgatttagataatacgttaattgcctggaataatccggatggaactcccgaattaagacaatggatcgaagatctaaaacaagaaaatattagagtaatcgtagtttctaacaataaccatgctcgcgttaagaaagcagttgaaggctttggacttgaatttgattcaagagctttaaaaccattgactgttggtattaatcgagtggtacgcaaaaataaattggataagaactccaccattatggttggagaccaattaattacggatatggccgctgcaaatttagctggagtgcggggagttttagtgaagccgttaattgaaacggacgcttggaatactaaattcaaccgttttttggaattctttgtaaagcgttctttaaaaaagaagtatccggaattagtttggcataaggagttacaataaatggacgaacaaaatgaattacgttgtattggttgtggagcaattctacaagtgactgataaaaaaacgcctggatatacaccagaatcagccttaaaaaagggattagaatctggccaattatattgtcaaagatgttttagattacgtcactacaatgaaattgctccagtagacattagtgatgatgacttccgaaagttattaagtcagattagtgattccaactcactagttgtgtatgtagttgacatgtttgattttaatggaagtttgattccaggacttcaccgatttattggagacaatccagtattgttggtaggaaataaagaagatgtctttccaaaatcaatcaaacgtcatcgtatgaaagaatggcttagacaacaagcaaaggcaaatggtattttgcctgaagatgtggttattaccagtgctaaaaatgctagttcagtggaagccttatttaatgcggtagaaaaattacgtaaaggtcgggacgtttatgtagtcggagttacaaatgttgggaagtcaactttaattaatagtttgattgctattcgcaatggaattaaagatgtaattactacttcccgttttccgggtactactttagatcgcattgaaattccgttcgatgatcatagtaatttgattgatacacccggaattattcatgccgatcaaatggcacatgtattggctgcggaagatttgaaatatgtctcgccacaaaagacgattaaacctcgtgtattccaactaaacagtcaacaaactctttttgtgggagctttagctcgatttgattacgaacactctgagggctctgtaacggcttattttgataataatcttatggttcatcggactaagttggaaaacgcagataatttttacgaaaaacatgcaggtgaattattgacacctccaactgcagataatttggctaaaatgcctaaattagttgcacatcagtttagtgcagatcaagatagtgatattgtttttgaaggattaggttggatatccgttcctgaaggaagcacgattactgcatgggcaccagagggtatttcagtagtaataagacgatcattaatttaagttgcaaataaaaggagaaacaatggaattaagaggaaaacaaaaaagatatcttagagctcgagcacattcataccgcccagttttttccgtgggtaaaaacggtctaactgaagcatggctcaatcaattggcaggagctttagacaaccatgaattattaaaaattaatatccaacaaaattcagatgcaacaacggctgaagctaaagaatttattgaatctaatacagatattcaagtagttcaaaccattggacgggtactagtgttgtttaaagtttcttcggaagcggataaacgtgaaatttcagatacagttaagaagatatagataaaggtgattaatcttgatagcaacaaaatctaaaacagtttctggagtacaagtagaagtggttgaagagccattaatacaaaagaaaggcaagaaaattggcattctgggagggacgtttaatccgcctcacattgctcatttattaattgctgaacaagtaggaagccagttgggactggataaggtgctatttattccagattttattccaccacatgttgatgagaaaaaaaccattcctgctgagcaccgagttgaaatggtccgcttagctattcaggataacccactgtttgatttagatttaatcgaaattaatcgtggtggttcaagttattcgtacgatacggttaaagaattaaaacaactacatccggaaaatgactattattttattattggtggtgacatggcggactatttaccgacttggcatcggattgacgaattagttaaaatggttcaatttgtgggtgttgatcggccgaaatatcaacgccaagaacaatatccgattatttgggtagatgttcctaagatggacattagttccaccaaaattagaaaaaacgttaagaatgggtgttcaattaggtatcaagtgcccgaaagtgtcgaaaagtatataaaggagcaccgtttatatgagcaataatgaagaattaatttatcaaaaaaactacgtgccttttacgcgagcagaattaatcgacgctgtttctaaaagtattaccggaagtcgattcgaacatgttctacgagttgaaaagaaggcgattgaattagcacaaaaatatgatgctgacgtggagaaagccagtattaccggtttactacacgattatgccaagcaacgtagtgatagtgaatttattaaatatattaatgaactagagctcgatccccaattattagattatggtaatgctatttggcatggtgttgttggcgcagaaatcgttaaaaatgaattgaagatttatgatgaagaaattttaaatgcaattcgacgtcataccgtcggggcaccatacatgacattgattgatcaaatagtgttcatggccgattatattgaagatggtcgtgattttgaaggcgtagaacaagcccgtttaattacagaacaaagtttacaaaagggcgttactttccaaatgaagagtacccttgcatacttaatcgctggaaataagccagtttttccagctacgattgaaagttataacgcatggatctcaaaatttaattaaaactaggagaaatagattgaacaatttagaagaattagaattactagtaaaagcagcagatagcaaacgagctgaaaatacaatcgttttaaatgtacgtgaggttagcaccttagcagactactttatgattacaagtgctgattctaaccgccaagtagctgccattgcagatgctattattgaaaaggctaaggaaaaccagatcgaaatccgtcgtattgaaggaaatcgtgctgcagaatggattttgattgacttaggaaatattgttattaatgttttccaaacggatcaaagaaagtactataatctggaaaagctttggtcccaagctgaagcagttgaaacaactgattggattgcagaataatgatatatcaaagctttgcggagttatatgaccaactttttgatgaagatgaataccaaaattggtttgaatatacgcaaaaagaagttgatttaagtcataaaaataattggcttgaattagcttgtggtgcgggaagattggttgttcaactcgcacagcatggacaaatcgtcacaggatttgatttgtcagaagaaatgttagctctagcagaacagcacactagagatgctgaggtggcagcagaactgattcaaggaaatatgttggatttaagtgaattagagcagtttgatgttgtatcatgctacgctgattctttttgctaccttccggatgaagaacaagtgttacagtcgtttagcgaagtgtatgagcacttaaaatctggcggccagtttatctttgacgtgatcactccatatcaaacaggggtgatttacccaggttatatgtttaactatcaagatgaccgccaagcattcatttggtcaagctttgaaggcgaagataaatatcatgtcgaacatgacttaactttttttaccaaagcaaatgatgatgagctatttagacggaccgaagaaactcattttgaacgaacgtatgaactggaaacgtacgttaaacttttagaaaaagctggtttttctaaaatcaaatactatgctgattatggaaaagctgaagtagatgaaaaaacaactcggtggttctttagttgtaggaggtagctgtattgcaagcatgcgcagtgattgcagagtttaatccatttcataatggacatcaatatttgttagagcagacacgcaaggttactaaggcggacttagtgatcgtaattatgagtggcaattttgtacagcggggggaacccgccttgattaataaatgggagagagcacgggttgccattaattgtggtgctgatttagttgtagaaatacctactgaatatgccattgattctgctaaagaatttgcccatgcgggagtagagattgctcaaaaattaggagctagctttttagcttttgggagtgaaaatccagatttggattttgaaaatgagagtaagattctggaccgacaatttgaccagagagccaaaaaatataatcaaaattttgcagctcaattatttgatgatacagccattacgaactcgaacgatattctaggaatcaattatgcgtactggaattctaaatcaaaaagaagcttgcagttaataccattgcaaagggaacaagcagatcaccgagatacggagataaagggctcgattgctagtgcatcggcaattcggagggcagctttagaacaatcagagtactttaacgcggtacctaaggcgtctttaaaggctattagaaatgctaaattaacaagctgggaagatttctggataatgttaaattatcggttattaacttcaacaccccaagaattacgtcatataaagggtgttacagagggtttcgaaaatcgtattttaaatttggttgataaaagtaactcgtttacagagttgatgcagaagttgaagactaaaagatacacttatactagaattcaacgaagtttaacgaatattttacttaatatccaagttactccgtttaatctaactaagacgagattattggcgacaaatcagctcggccggatttttatccgagaagcagcccttggatcagtagtaatgaccaaagtcaccaaagaagattttgaaaataattatgcaattacaaaacgagcagacgatttataccaattagtttctccatatcaatggggaaagggccctattataaaaaagaatgtcaaggaataaacgttgacaatgtggttccacatggtataattgtttctgttgcattggaggttcattatggaatggtattttacagaactgcgtaagcacaaagagccgtttcagttcgatgaaacgatggatttggaacaatctttagtcgaacgctttccagatgtagttattaaatgctcaccaattaattttaaaggaacggtgacaatcgaacgtgattcagttatcattgatgctgagatcagttgtgatttgacagttccttcatcacgatcattgaagcctgtccacatgaatttagactttttcataagtgaaatttatgtagataatcctagtattattgattcttttgcgaaagaagaagtggtaatgctagttgaagatgatgtgattagtgttgataaactaattgaagataatatcgtccttcaagttccaatgcaggttttaacgcctgaagaggaaaaagagggagtcatgccttctggtgcagaatggcaagtgatttctgagatggacgtggaatcggagcatgaaaaacaagttgatccacgccttgctaagttaaagggtttattgaaagataatcctgaatcgtaaggctttaaaaaagcgggaaaccgaattctcttaaaggaggtgctcatagatggctgttccagcaagaagaacatcaaagacacgtaagcgtaatcgtcgtggacacattaagttaactactccaggtttggcaccatgtccaaactgtggtgaattacgagtttcacatcgtgtttgcccaagttgtggttactataacggaaaacaagttattgacgtgaaagctaactaatttgttaaaagaagtaaaaggagcctaggtccttttacttctttttttgtgtttaaaacgattgaatataaattgcttagtgttatatattaattaaatctccttagaggttctcagctttttatacattttttttacttatctgttaaaatataatatattgctacacaaagtttcgagtattttaaaatcaatgtcttgaaacaattgttagatatagaggaggaatcacgatggatcaaccacaaattggtgtagtgggaatggccgtaatgggtaaaaatctcgctttaaacatcgaaagcaggggatatacagttgcgatctacaaccgtactgcctcaaaaactgaaaaagtaatgcaagatcattctgaaaagaaattagttcctgcatattctattgaagaattcgtaaattcactagaaaagcctcgtcgaattatgatgatggttaaggctggtaaaccaactgatgctgttattgctgaattacttcctttacttgacaaaggagatgtcttaatcgacggtggtaacactaactttgaagacactatgcgtcgtaataaagaattggatgaatctggaattaacttcattggtacaggtgtttcaggtggtgaattaggtgcgttacaaggtccttcaatgatgccaggtggacaaaaagaagcttatgacttagttgcaccaatcttcgaacaaatctctgctaaggctaaagacggcgatccatgtgtgacctatattggatctaacggagctggtcattacgttaaaatggttcataacggaattgaatatggtgatgaacaattaatcgatgaaagttacgacctaatgcgtaagttactggatctcccagttaaagaaattgctgatatttttgctgactggaatcaaggtgaacttgacagttatctaatcgatattactgctgatattctaacaagaacggacgatcttggttcagataaaccaatcgttgatcttattatggataaaggtggcaataaaggaacaggtaagtggagttcacaaaatgcacttgaattaggggttccacaatcgctcatcactgaatctgtatatgctcgttatatttccatgcttaaggacgaacgtgtcgcagcaagtaaagtgcttgcaggtccagaaaagaaaattgacgttgacaaggatgaagtcatcgaaaaaattcgtcgcgcactatacttcagtaagattatgagttacgctcaaggatttgaacaaatgcgtgtagcttctgaaaattatgactggaacttgaattttggtgaaattgccaagatctggcgtgctggatgtatcatccgtgctcaattccttcaaaatattacagatgctttcgataagaatcctgaactaaataaccttttgatggattcatacttccaagaaattgctgctaagtatcaagaagccgttcgtgacgtagttgcacttgctgttaaagctggaattccagttcccgcactatcagcagcggtagcatactatgattcatatcgttcagctgttttaccagcaaatcttcttcaagcacaacgtgattactttggtgctcacacctacgaacgtgttgatcgcgaaggtatttaccattttccatggtatgaagaacaataaaaattagtttaaatagaaaagcgataaccgttacggctaccgctttttttatatggattattaaggatatcactttgagactaggtcaaattaagtgagccacttaagtagaggctaggcttttcaccaatatagtgcaacccaaaacgcaagcactagatggaaaaatagttgcttagaatcgaaaaacttttaaaataacaaaactgatgtgaaataagttaagatactataattaaattattacgtttcaaagtcaaatcaaataatctaacaatcttatttatattggattagaaaggaatggaagcctagggaagctatttgactcccttttgtttgcaacataatattggaagcgctaggcaaagcaaccggataatgttagaatttactacagtagggttaaaataatttaattttggggtaaaaaaatgagtcgtattttgataatcgaagatgaaaaaagtcttgcacgttttgttcaacttgaattacagcatgaaggatatgaagttgaagttcaatctaacggacgcacaggtttagaagcagcattatcagaagattttgatgctatcttacttgatttaatgttgccagaaattaatggaattgaagtatgtaggcgtattagaagagaaaaaataactcctattattatgatgacagctcgcgattcaatcattgatcgtgtttcaggtcttgatcacggggcagatgattatattgtaaaaccttttgctattgaagaattacttgctcgtttacgcgcagttcttcgccgagtggatttagaaacacaagattccactttccaccaaacaacggttgaatttcaagatattgttattgaaaaggaaaatcgagttgtacgtcgtaataacgaagtaatcaatttaactaaacgtgaatatgagttgctattgttattaatggaaaatattaacgtggttcagtctcgagaaactttattgaataaggtatggggtgtagacgatggtgtagaaactaacgttgtcgatgtgtacattagatacctccgaaataaaattgatgttaagggacgtcctagctacattcaaaccgtacgtggtactggatatgtaatgaggacctagtatggaaaataaagtaattaaaaaaaagagaatgtcgctaaaatggaaatgggctatcggtactggtgttggagtcctattaatttttgcacttttctctttttttgtttttaaaattgtaacagattcattatatgctgaagaacatcgagatgtggaatcaacagtaacccaagtaagaagtcgtcttcaaaatgcgaatgagattaattataaaactacggatatattcaggcctgatttaaaccaaaaatcggcggttaataataaccaaggtggttttaatgattcattgttagcgagtttaaccaggcgagatttagtagtttcagtttataatttagaaaaagaatcagttttttcgaatcaaagaattaatatgaagactagtctctccgagcgaaagtcaattaaacggagtaaatttcatcataaagatattattgtgggacaagcaccgattattaataaagataatcaagtaatcgggtatgtacgagttgttgatttactggtgaaatataataacagatatcagcgcttgatctggttatttactttaacgtcgcttttaatttttatggtaatctccattttcggttatggattaacggcatacttattaaaaccaatgaatttaattaatcagtcgatgcgtaatttagaggaagatcctcaaaccgatttaagagttcctgaaattgatacaaatgacgagttatcggacttggctcatgaatttaatgatatgattgatcgaatgcaacgctatattgatcaacagagacagtttgttgaagatgtatcacatgaattgcgaacgccagtggcagttgtggaaggtcacctaaagatgcttgaccgttggggaaaggatgatccacaagttttggatgaatcaattaaagcgtccttagaagaaacgcaacgaatgaaaagtttagttagtgaaatgctagatctaacacgagctgatcaaattgagattaattatgccgatgaaaaaacgaacgtcgttcaattagtaaatcaagtattcaatgattttaaggtgattcatccagaatttaatttcgtaatggatgacgatattactggtgaacccattgttcctatatatcggaatcatttagaacaaattctcgtaatcctgcttgataatgccatcaagtactcaaaagatcgcaaagaaattcatatttcaactgctaataccaaaaagaccgttgaaattgctgtacaagattttggtgaggggattgctgaagaaaatctgaaacaggtatttaatcgtttctatcgaatcgacaaagctcgcagtcgagatcaaggtgggaacggtttaggtttatccattgctaagaaattaactgaagaatatcatggaaatatttcgctagaaagttcagttggttcaggttcaatatttagaattaaattaccgattattgaagatcaacagatagaaattagtgaaaaataaaaaatccttggaaaatgagttttactcaaaattttccaaggatttttttggtatttaattttagtcacgatgatgattttgtttacctgcattacgacgaggtttgttattttgtggtttagaaactggtttagttttaggttcactagtaacctctgtggctgtttctgtaatatttttaagatctactggaccagttggttcaacaatcttaggaggattctttttcatttcctcttggatccgtgctttaatttttggacgatagagattaattgcgagtgtttggatacatgcaaaaactccaccaacagcaaagtaaagtcctaatccaccaggggaagaaaaagtgaaaaatagaatcatcaaaggactgacaatcatcatggaacgcatcatttttctttgttctggtgcaacacctaaagtacctaaccagccttgtaataagtaaacaaggaaggaaattgctgccaataaaatacttggcttagccaaattaatacctaggaataatccctgatgtaattcaggtgaatactgaatagctgcgtataatgcggcaaaaacaggaaattggatgataattggaaggcaaccaattccaccagtcatgctaacgttgttatccttatacaaggccatcatttcctgactaatagcggcacgctcttcaggcgttttagctgcttgattacgtgcttgaagtaccttaagctggggctgaataaatgccattttttcttgttgaattgtggctttgcgagattgatttaacatcaatggaagcaaaattaaacgaacaacaaaagtaacaagaataatcgctagcccataacttccaccaagtaagtgtgaaagataattcataaagtgctgagtggggatggctagataatcatagatcggtccatacggattaccgtgtttatcacgttggacacatccactaagaactaatgcgagtcccgagattaaagtaatcgtcgagatacttttaagctttttcataatatacgtacaattcccttctgaatgctagaaatacaagggtaactatacttgattttccgtcttttttcaatgaaatttagtatttaacaataaagtcttgcccttcaaataagggaattgatttaacagttaatttattgactcgtccagatggcgaaggtgaggcttttactccatcaataaactggtctaaaacagcgtctggagcctgcgcctcaatttctacggtaccatcggggttgtttttgacccatccagttactttaagtcgatcagctagtaatttggttgtataacggaatcccacagcttgtacccgtccagaagcgttcatgtgaacagctttcattataatcattcctttcaaaaagatttatattaataattttaacatcgttaccttaatttgttagtatgaaaggtgttaagattaaaagttcggcaagtctgtatatcatttagattgtgataatgatacgattaaataggatagaaacagaatacttacaaatggtaaggagataaggtataattatggaaaagatttcttcaacaaagaatccaaaagtgaaagaatgggtgaaactaaaaaccaataatggtagaaaaaaatttaagaaatttcttttagaaggacgtcatccagtggagacggctttggaacaggcaactgaatatgagtttttaattgtccaagaagactttgatttaggtgagcttgctgaacaagtcgataatgacaaattaattttagtgaccaaagaagttgctaatcatatttcagatactgttcacgatcaaggcatctttttaattggttacattaacgaggaagattggcaatttccagatgatttgtctggaaaatggttagttttggataatgtacaagatcctggaaatattggtacaatggtaagaacggctgatgcggctgggtttacaggagttgtatttggcgatgggacagctgatttctataaccctaagattctaagggctatgcagggtagtcagtatcacttgcagttgaaacgattgaatcttgagaaatggattcgtaattgtaaggatcaaggtagtgtaatttttggttcaattttagatgaaaatgcccgtgactatcgtaaaattgatgttccagaccagttctctttgattatggggaatgaaggcaacggcatgagtgaaagacttattgaaatgacggatatgaatttatatattccaatcaagggttccgcagaatctttgaatgtggcggttgctgctggagtgttaatgtttggtttagctggttaaggttttgttacgttttaaatttggcaattagatttgcttgatttaaaaaagtatgacgctaagatggtagtaacttgagctaaaaaggagctttttaatgaagtcactagattggaaaaatgattctgaatatatggcaattgttggagatttattagagaaaaaagaggttcaaaagttagataactacactcaacatcacaatggaactcgtttggatcactgtattagcgtttcctatgaaagctatttgttagccaaaaaacacaatctagatgctgtttcgacagcacgagctgggttactccatgatttattctattacgattggagaacaactaagtttactttgggttctcacgcctttatccatcctcgggttgctttacgtaatgcggaaaagctcacggtcttgaatgataaagaaaaagatattatattaaaacatatgtggggagccactatcgcgcgacctaaatattttgaaagcagtattgtgtcatttgtagatgacgaacaagctattactgaatattttgatcatgttcgcaaggaatttaagatgaaactcatgaaatataaagagaaaattattaagtttatctagtaaaagaggtttttataatgcagagtacacaactaaaagaacaaactgattttgaactttgtccaaagtttgaaaagatgtttgatatattaggaaaaaaatggaatggacttattttagaagtgcttatgaatgctggtccacagcgttttaaagacattgcgcatagtgttacgaaatgtagtgaccgtgtacttgtagagcgtttgaaaagcttagaggaagctgggctagtggaacgatgtacttatgaggattcttccttaattgagtatcgattaacagaacaaggtgaaaatctacgtccggtgcttgacgccgctcataaatttgctgattgctggttttaattaggtattgacctaatgcgtttttttggttaaagtagctaagagaataaaagctcgaagagtagtagctgatttaaattatcagacagagaaggaatcgttaggttgagagattccgatgatggtttcagtgaattcgcttcgatttaaaaatgggcaggccacccgtatctggctgaccaagtgtgcattgagttgcaaacaagggtggtaccgcgttaaaaaacgtccctttctaggaggggcgtttttttatttggagaaaggtggaaagatcatgagtttacaagagaagttaaaagaacttgaagaaaaaggtcttcaagaaattagcgttgctaatgaattatcaaaattaaatgaagtacgggtcaattttttaggtaaaaaaggtccgattactgaggtcctccgagggatgcgtgatttaagtaaagaggaacgtcctaaggtcggtgaatttgctaataaagtacgtgataacctaacatctaaattggaagaacgtaaagaagaattagcacaggcagccttgaataaaaaattagctgaagaggctgtagatgttactttgccagggacaccgatgaagcaaggccaaccgcatgttattcagcaaattattgataacttggaagatttattccttgggatgggttaccaagttgttgaaggaccagaagttgaactcgaccgctataactttgaaatgctaaatctgcctaaagatcatccggctcgtgatatgcaagatacattttacatcacggacgaagttttgatgcgctctcaaacttctccagttcaagctcgaacaatggaaaaacatgacttttcaaagggaccattaaaaatgatctcaccaggggtagtttaccgtcgcgatactgatgatgctactcattcacaccaattccatcaaattgaaggattagtgattgataagaacattacgatgggtgatttgaaaggtactttagtaactttggctaaggaactttttggtgatcgttttgaagtacgcttgcgtccaagttattttccatttacagaaccttctgttgaagcagacgttacttgctttaattgtatgggaaaaggttgttcagtatgtaagtcaaccggttggatagaagtattaggggctggaatggttcatcctaatgttttgaaaatggctggtgtggacacggacgtttacggtggttttgcctttggattaggacctgatcgttttgcaatgttacgttatggtgttgatgatattcgtaatttctacctaaatgatgttagattcctatcccaattcaataagcgaggttaataaaaaatgaaactttcatacaagtggttatctaaatatttagaactaaacttagaacctaaagacttggctgaaaagattgaacgtacagctgttgaagttgattcagttacaagattagattataaattaaagaaaattgttgtgggtcataccctagaagtgactgaacatcctgattcagatcatttgcacatttgccaagttgatgttggtgaagaagaaccaattcaaattgtttgtggtgcacctaatattgctgcagaccaagatgttattgttgctctccacggttcaagaatcaaagacaacgtcaaaattaagcgtagcaaaatgcgtggagttccatctaatgggatgatttgtgctctgcaagaaattggttacccagacaatgtggtacctaaagactatgcagatggaatttacgtattcccagctgacagccatgttaaaccaggtgattctgtaatggaagctttaggaatggatgacgatgtgattgatacatccgtaacacctaatcgtggtgatatgttcagtatgaacggtaatgcacacgaaattgccgctattctagatcaaaaggctaattttgaagttttgaaggtccaagacgaacaaaaatcagctgatactttagccgatcaaataaaagttgaaatcgatgagcaagatgttgccccagtttacaagttgatggccattgaaaacgtgaaaattgcgcctagtccattctggctacaaacgacattgatgaaggcgggaattcgtcctattaataatgtagtggatgttactaattacattatgttgaaatatggacaacctcttcatgcctatgatttggaccaacttaaaggtcaaacaatttcagttgctccagcgggtgaaaatgttaaatttactactttagatgatgaaaaacgtgatttgcgtccagaagaccttgtaatcacagctgatgggaccccgattgcaatggctggtgtgatgggtggaatggctacagaagttagtgatcaaactcaaaatattgttattgaagcagcaatttttgacccaattaaagtccgtaaaactgctcgttatcataatctacatagcgaagctgcaatgcgttttgaacgtggtattgactatagttcacttgatgatgcattaaacgaagcagccagcttagtagctgattttggtcaagggaaagtaatgagcggggtagttgttggcaatgatactaaacttaatcctgaatcaattacaatcgctttagctcgtattaacaaaattttaggtacgtcacttactagtgaagaagtcgtagctatttttgatcgacttggatttagtacagaattagatgctacaaagcagaccttcaaggtaactgttcccgttcgtcgttgggacattcatattgaagctgacttgctagaggaagttgctcgaatctttggttacgacaacttaccagtgacattaccaactggtgatccaactattggacaacttactactgaacagaaattgatgcgggcctcaagaacagttatggaaggcttagggcttactcaagccatgagttatggacttacaaccattgccaagagtcaacaatttgtgaagggtgatcacgaactagtgaaggtcgattggccaatgacaaaggaccgagaagccttaagaatgaatctaattagtggattacttgatgatattgcttacaataaggcacgttcagtggaaaatgttgctctttatgaacaagggcgagttttctatggaaatggacaagcacaaccagaagaaattgaacatattgcaggagcaattacaggttcaatgcaggctaagtcttggaatgaaaaagaaaagccagtaactttctttgatgttaagggaattgtagaacaataccttaagaatgttgccgttgctggagaagtaagttatgttgcagaccatgatcgtcaggggatgcatccgggacgcactgctgatgttttgcttgatggagatgtaattggttttattggtcaaattcatccaaccactgcagaagagtttaagattaaggaaacttatgtttttgaattgaatttaacaaaaattattcatgccgaaaagaagttacaacattatgacgtaatttctaaatatcctgcaattacacgagacattgctattttagttaataaggaagtttctaatacagaagttctaaacgttattaatgaaactaagcaaaagaacttgataaaagttgaattgtttgatgtttatgaaggtaagaaccttgaaaaagggatgaagtccttggcatatcaatttacttatcaagatacaaatgatactttgcaagaagatgctatcaatgatgaattttctaaggtaattaaaaacttggaagagaaattaaatgtaaccgttagataaccgtattaaatctatgttactttaatgcgaagttaaagatagttattgtataattaccattattgtaaatgataggagaaatgatcttggataataacaatgattcgaatcaaagacatagtcgtgtacagagtaactataaacgacaaaaaaacggtcacaacattattaaatgggtgattggtatcttagttgctgttgttttaatcactacgtttatgggataccgctattacagcacttccctacaacctttagacgcgaagagcaataaacaaattgaaattaatattccggttggaacaacttcacgaggagtgggctcgattctagaggataaacatgtcgttaagagtggtgcagtattcaattactacactaagtctaagaaaatcaataacttccaagcaggttattatgttttaaaaccatcgatgactttaaaacaaatcgctaaaaaacttgaaaagggtggagcagcagagccaattgccttgaacggtccacgcgtattaatcaaggaaggcgaaaatattgatcagattgctaattcgatgaaatcttcgaagtactttaagaagtccgatttcttgaaattaatgaaagatgaggactttataaagagtctagctaagcaatatcctaaattactgggatcggcgatgaaggctcaaaacgtgcgctatcgattagaagggtacttattcccagctagttatgcaattgataaaaataccaaactaaaagatgtcattacgcaaatggttgctaaagaggatgctgttttacaaccttattattctaagattaaatcagatggtttaaccgttcaggaaactttgagtgtagcgtcactagttgaaatggaaggtagtaaatcttgcgatcgctctaagattgcaggggtcttcttaaatcgtatcaagcaaggtgaaacattaggatctgatgtttcaacacgttatgcagttaaaaaatccgcaacagaagacttaactcaatccgatttagcaagtactaacccatataacactcgggtgaatactggatttatgccaggaccagttgataatcctggtgaagattctattctatccgtggttaatgctgatactaaagacggatatctattcttctttgcagttacaaaaaatgtatctggttcaaaacataaagttggagacgtcttgttctacaaagacattacttcatttaacgaagcagttgcgaagtacaatccagaaggtaaatagtgaggaattaagcttatgagtacaaagaacagcccaataattattggggtaaccgggggatccggtagtggaaaaacaactgttagtcaaaaaattcttgaagaattacatggtcattcgatttctatcattcaacaagattcgtattacaaagatcaagctgaaaaaacgatggaagagcgccgggcggttaattacgaccatccactggcctttgatgccgaccttttatatgaacatttaaaaatgttgaaaaacaaccaaaaaatcgaagttcctatttatgattataaaatttcgacgcgaagttcagaagttattgaacaagacccaaccgacgtgattatccttgaggggattttaatcctagcagatgagcgaattcgtgatatgttagacattaaggtttacgttgatactgatgatgatattagaattattcgtcgtattcgtcgcgatatggaacaacgtgcacgaacattagattcaatcattaatcaatatttaacgggtgttaaacccatgtaccaccaatttattgagccaaccaagcgctatgctgatgtgattgttcctgaaggtggaaaaaacagtgtggcgattgatttattggttacaaaagttcgcgatattctatcagaagatgggcgcgatgagagttttaataaataattttgaggtgtaaaaatggcagatgaaaaaacttatccaatgactttggatggaaaagctaagttagaagaagaactagaaactttaaaaacaaagactcgtccacaagttatcgaacgtattaaaatcgctagaagctttggcgatctatctgaaaattcagaatatgaatcagctaaagatgagcaaagcatggtagaaagccgaatcaatacggtcgaacatatgctccactatgcacaaatcattgataatgatgatattgctggtgatgaagtttctttaggccgagtggttgaatttaaagagcttcctgatgaagaaccagaagaatatacgatcgttggggctgcagaagccgaccctatgactggtaaaatttcaaacgattcaccaattgctaaagcacttttaggtaaaaaagttggcgatgaagtttcaatcgctactcccggtggagatatgaaagttaaaatcctaaccgttaaaaatgcttaaaaactaatcatattaaaaaagcttttcacttcttatgagtgaaaagctttttttgttggagcaagacgagcattagaaaaccaattatggtaatagacatacctagcataaagaatggtggtgtataagtaaacttgatttgatgtttgccagaagttaattttacgttgcttcctaagaagtaattaccgactttagaagtaggaatcgttttaccatcaattttaatgtgccatcccgaactgtaagggatggaagtgaataagtagggtttatcagaattaacgtttaaattgcctgtgactacgttcccagcgttttttacctgcgttagactatttgtcttagcagcttggtaatcttgcttaaatgtgccgtaatgaagctcagcgacactaaaatcagataaaagtaaactttgcttctttaaaacaatttgaatacgaacttttttgcctttcatctgatctgcaatcgataaaacaattggttggtcataatcaaggtcttcagtaattcgttggttgttaacgaagatatccgcattatcatgtgaaagttgtgatccggcggtaatataaattggattattattttttggctcatattcaaaagttaccgtggcagccttattaagtttctgtttagttaacagaccatttttaatattaggcgtggaagtaacatttgaaaagtaaatttgggcctggttagtaatgtctgtaaataaattttgagaatgattactgatttttttgagtaaattagattgatattgcaaaggatttccaatttttttagtattacttaccggatgagtagtagtaagacctaatggaagggcatattgatttaagtagttatcagcatatttagtgttaccaatctgatgatacctttttaaaacatcgtgccgaacacttttagttgaaaaaggattatggtcagtttcgttatttacaaatgaccaatacttgaagttcaggagggcatcagagatcaaggttccgttcatataggtcacatttccggaagttgtaggttggcccagagcactcatcatatcaagcatattagtttctaggttagagttaaaacttgatccactattgaaatctaattgaattggatcatttttagtcctagagtaatttgtaccaatcctcgaaaaatgatgaccttggtctttaatctggtcgattgcattgcgagctgctgagctatattgagcaaattcggtttggctaacataacttatacgattcaacgaccagatagcattgacagataaatctagggccataaaacaaattaaaattggcgtgagccccggattaaagtctttagcttggaagccaacccaaaagacaagcgctgcaataaagataataactccaaattgaatttgattctcggtcataaagtcgctaatttttggtaaatttttagttgatatataagcaacaagactaatgagtgctaaaccagcgatgatgggttttaaaagtgcttcttggatgggatgtaatagtccttcaaaagctaaaataagaacccagaaactaaaaatgaaactaaaacgatatgcataccaccatggaaattgcatggcatgccagaataagtttaatggggtgaaacagaaagaaagtaagaaaaaagcagttattaatagagctccaagtcgtctttttaaaccaatatttttattgaaaaagtaggcgacaaaagccgttaacacaaacattcccacgtaaatatttggtagaccatcagacatttgcttaaagctgaatgtccctggcattaatttagttaacattttaagtggtgtgtaagcaaaagaccatttaattgagttttctgtatactgtgctttaccatggaggagagcccataatgtcggcatccaagcaatggcggaaaaaactagaacgtaaatccaagattgaacatagtgaaaaatctttttccatgataacggcgaagctcgccataaaaagtaaattaaggtgaaaataccaatcatataagcaaagtaataatttataatgaccattaagctcatcgtcgttacaaaaattttaatttgattttgatcaattagagcatccaaaccaagaataattaagggtaataagatgggagcatctagccaaaaaaggttaagttgattggcgatggaaaaagccatcaaactataggtagtagcaaaaccaacaacactagctcgcggagtggtgattttatttttttgagcaagatgctgcaagtaaatagcagatgttagtccagctaaagcgtattttagtacagttattactaggattccggaagtgatactctcttttttaaaaaacaaaagcagcaaattggttggactgaaaagataataagcccaagtaccaaacatatctccacctaaaccattggaaaaagaatagaaaaactgaccaggatgactgataagtgtactgcggaaatattcatagaacgcgacatattgctgtcccatatcgacagttaatagactagatgttccaaatggagcaaatccgcgataaacgaagtatgctagcataatgcaagcagggatacatccacttaaaattaaattctgatgtttcttaataaaatccattaaaatcccaacctttaaattgataataataggatagcacaaaacatgcttaagactttgttaatactattagtacaccgatatattttctggtagaatgaacgaagtgatctaaaaggagcaacataaataatgaaaaatcctaaaaaaattaggcgaccaaaaagtgaattaccatttcgattgaatttgatcttttttgttgtttttgcgttattactactgttagttggacaattagggtatttacaaattttgtatggctcgaagttgcaagcagtcgtaaatcgaactgataacaccgttgaaaccaataatgttcagcggggggtgatttacgattctactggaaaggttttagtaggaaatactgcgcatcaggctatttcgtataccaagggtgccaacgtaatggctcaagacatgttcaatattgctaatacacttggaaaatatcttgaagccaatgatacagagttgagtcgaacagatattgcgaattacttgctggcagattctaaaaatagtaaatactacgaaaagaaaattactaatcgtgaaaatttgagtagtaaggcagttcaggaaaaagaaattgactatatcaaaaattcggatattaagttaagttcaaaagaagaaaatgctgctcgaatttttaaaattatgaatggagcttaccaactttctacggtttatattaaggaaacggatgtttctagtaaggagctatctgagattggtgagcacctttctgagatgcctggggtcaaaatttcaacaagttggactcgtagctatccagaggggaatgacattaagtccctagcaggaacggtaagtagttccaaaactggtctacctagtgatgaggttaacactttattagctgaaggttatgctcgtaatgatagcgtgggacaaagttatctcgaaaaacagtatgaatcagttttaaagggaaccaaatcgcagactgccattcaagttagctcgggaggacagattgttaagaaagttcaacaatatgctggtaaaaaaggtgataatcttgttttaacgattaactccaagttccaagaagaagtccaaaaaattatgaaagaggcctcaaaaaacgctggtggacaatcaactggtggctatgcagtggtaatgaatcctaaaacaggagcagtgattgcgcttgctggtgctgaccgaaatccttcaacaggtaagatgacagataatgtcttaggaacaattaatgaaccaattgtaatgggttccgtggttaagggtgcaacaatttctggagctttgatggacggggttattactcccagcaataataccttgattgatgaaccaattaaggtggctggaacaggatcaaagagttcttggtttaatagtactggtagtgcaaatatgtcagttaacgcttcgagagcgttagaagtttcttctaactcatatatgatgcaattagccatgaaagaaggagggtttaagtactcctcaggggcatccttgtcagggatgaatcctaatgtctttaacaaattgcgtggatattttgaacaatttggtctaggtactaaaacaggcattgaccttcctggtgaatcttctgggtttaaaggacctactggctctgctaatattggtaaagcgctcgatttatcttttggtaattatgatgcttatacaaccattcaagttgcgcaatacatgtcgaccattgcaaatggtggttatcgtgttgctccacatgtggttgaacaaattagaagtagtaaacaaaatggaaaaatgggagcagtccaaaagaccgtttcaccaactgttttaaatcaagttgatatgacttctgcacagagaaaattagttacagatgggttatatgacgtggttcatggaagtaataaatataagaccggtgggccactagctggtatttctcccggaatttctgctaaaactggtacagctcagacgacaaccaatgggaaaacaacagtaacgttgtcattagcttcttatgctccatctaatgatcctcaagtagttgtagcgctagctctgccaggattaagtacaaatgctgaatcggataatatgacggctgctaagaagatctatgcggcatattggaaatatgtccaatccaaatcaacccttactaatccaactaaagcaacctctgaaaccgctgctcagaacttgaattccaattaatcgcaattggttctggaaaaattttcagaatagtggtaacatgtacaatgctagtggattttcgaattcaaatatatatattaatggaggtcattccaatgcgtgtacacattactttagaatgtactgaatgccataaccgtcaatacttatcaaacaagaacaaacgtaacaatccggatcgtttggaactaaacaagtattgccctcgtgaacgcaaagttacattacacaaggaaacaaaataatcgtaattaaggctggaagactgcaatttgctgtcgcttctagctttttttatatatttaaatgtaactatgggggataaaatgaataaaaatatctttaggcaaactcaaattaaacgcttaaatcaaattgatataacgtctaaaagagctaaagaggcgttaattttagaaagttttttcgatcaacatgaagtaaaaaatgctcgaaaattagcgataactatgagtcacggctttgagctagacaccgcacccattattcaacggctaatggaaaatggtaaatgtgtctatgtcccacggaccttgccagaacgacagatggagttcgtcgaatataatttaaatacacccatgcaaccaaagttccaaggaattttagaaccagtaggggggaacgtggttcgtcccgaagcattggatctaataattgtccctggtctagcttatgaagtttcgaatggttatcggttgggatttgggggaggatattacgatcgttacttgaaaaaaacgccagcctcgaaaatagttttagctttttcagaacaaatttattcagaccctcagtgggatgtagaaccctttgatgtaccattagaaaaaattattacagaagaaggggttcaatttgaacgttagatgattcggtttgaaaagggaggttcttaatgagtgatcaaaaacagcttttaaagcgcctgtacgaaggcccattcgttacacaaacaatcgtgggaattaatattttagtttttctttggttgacgctaatcggcggaagcacgaatatttcagtcctagttacccacggtgctttggtaccggtgctggtacaaaacggtcagggactgtggacaatatttacatcgatgtttattcatattggatttgaacatatcttgtttaatatgattgcgttatactttattggtaggcttttggaacgaatgattggtcattggaaatttgtattaatatatattttttcgggactttttgctaatttagcaagtttagctttctcaaaccctaatagtatttctgctggtgcaagtggggctatttttgggattatcggtgtatggctgatgatggcagaacagtatcgagagtaccccgcattaatcgatatgggtaaacaaatgctattatttagcgttttgggcttgataagtggactgttgggtactaacatgaatattattgcgcatttaggtggtttagtttctggatttttaatagcgtatgtaatcggattccctaaatttggtaaggttccaacttggaaacatattggtagtgcaattttaatcgttcttatgatgatagcgttttgtaaattagcgtttacatcataacaataatctggtaaattagttgagatggtattatggaaacactttatgatgtgcaacaacttttaaagcaattcggaatatttgtttacgttggaaaacgtaaatgggatattgaattgatgagtattgaattgaaaaatttgtacaaagcaggagtcgtcgataaaccgacttatgttaaagctcagttggttttacgacatgagcatcatattgaagaggttagagataaccaacaaaaataatggagggtttcgaagtaatggaacgtaaattaatcggtgtcgatcttggtggaacaacaattaagtttgctattttaactgaaaatggcgatgttcaacaaaaatggagtgtggaaacaaatgttttagatgaaggttcacacattgttccagacattattgactcaatcaatcatcatcttgatttatataagatgactaaggatcaatttattggaatcgggatgggaacaccgggaactgtaaaccgcgaaaatggtacagtaattggtgctttcaacctgaactggaaagaaactcaatacgttaaggatgcaattgaagatggtacaggaatcaagtttgccattgataacgatgctaatgttgctggtctaggtgaacgttggaagggtgctggagaaaacggcgaagatgtttctttcgttactcttggtaccggtatcggtggcggtttgattgctggtggacaattgcttcatggtttagctggagctgctggtgaaatcggacatgttacggttgatcctgaaggttacctatgtacatgtggtaagcgtggatgtcttgaacaatatgccagtgctacaggtgttgttcatgtagcccgcgacatggcggaagaattttctggcgattcagaacttaaacgtgaaactgatgacggacaagatattacttctaaattagttttcgaccttgcaaagaagggtgacgttttagctcttcgtgttgttgatcgggtctgcagtctcctaggacttgctttaggtaacttggctaatactttaaaccctgaaagcattgttatcggtggcggagtttcagcagctggtgatttcttattagaacgtgtccgtaattattacgaacaatatgcattctcaactgttcgttcttcaacccaattaaaattagctcgcttaggaaatgacgctggtgtaatcggtgccgcttcattagctcgtgtatttgcataaataaaacaaaaattttggagatgagagaaacatggctgttgctgctgcaaaatatacaaccggattttggataaatacaatcgtgatcatccttatcattgcatatctagtttatcaactttacttatactggaaacgtggtaagatttcgactcaattagatgatgatgaatttcgagctggaatgcgtaaagcacaagtgattgatgttagagaaaagaaggaatttgatgcaggtcatattcttggtgctagaaatattccgtattcgcaaatgaaagacagaacccaagaattgcgttctgatttaccggtttatttatacgatcaaggacgtacttttagtggacgtgcagcaatgcttctatccaaaaaaggtttcacccaactctatattttaaaaaatggatatcaacgttggactggaaaaactaaaaagactaaatattaaaaagagattgggttaaaatagaattaacccaacctcttttttatttgtgtagattagccattatgtgcagagtgctgtttacggtgcgcacgacgacgattttcttcggtgcgttcgacttgttcttcaacaggttcaactacgactttatgaaaagcgaagagtgccccagcaattgcaccaagtgttgagattgttccaaatagaaaaccttttacaaatttacccatcttattcagctccttacttatgattaccttaattatgcgctgaattgatttaaaatgccagaaatagatataggagaacgatatgattactcaaattattgcccaccgtggaagtaaaggcgtgcgaccagaaaacacaatagtggcttttaataaagctattgacgaaggcgctgatggaattgagactgatgttcacttgtctaaagatgggaagttagtcattattcatgatgagactgttaataggaccacagatggagaaggccgcatttttgataaaaccttagctgaaattaagaaattagatgcgggagcatatttcagtgaaaagtatgttaacgaacgcattctaacgctccaggaagtagttgatttattaattcaaagaaaatatcatggtatttttaacctagaattgaaaacagataaaattaaatatccaggaattgaacaaaaggtttatgaagttcttaagggtgaagatttcccattccatttggtatattccagttttaatccgaaatcgattagcgtgttacatcaattacaaccagaagttgaagctgctagcttatttaaaattaatacgaaagcggctcgccgattcagtagaagaagaattattcaagagtggcacccaagtatcgcatgggtgcgtagtcatcgatttttcttacctcacgtccaattacggccatggacagtcaattctgaagatgatatcaagtactgctttaaaaagaattttaaggggattatcacggactatccaacaagagctttaaaaattagaaaaaagatgcagggagaataatatggaaaaatttttagcaattgttggtccaactgcagtcggaaaaaccaacctgtcgattgatattgcaaaaaaatttaacggagagatcatttctggggattcgatgcaagtctatcaaaaattagatattggcacggcaaaagttaccatagaggaaatgcaaggaatcccacaccatttgattgataccaagactatccatgatcgcttttcagctgctgattttaaagaaacggctcaaaaattgattagtgaaattagtcagcgagataagctaccaattgtggttggtggaaccggtttttacctacaggctctattaagagatttggagttaggaggtagcaatgaggatcgaaatcaaattgaagcgatccgtgcagagttaaatcaaaaagaaaatgatgaactattatcgatactaaaaacaatcgatttagcaacttacgaaaatattgatcgaaagaaccggcgacgaattattcgagcaattgaagtttttaaagtgtcaggccaaaagatgtcagaccagcaaatgcaaccgacggcggtttatgatgacctactaattggcttaaatacggaacgctctatcttataccaacgtatcaaccatcgggtaaacatgatgttagacgctggacttgaaaatgaagcacgctggttgtttgacgaaactaaggtaccacaagccaacaaggggattggatatcgagagtggcaaggttattttgaaaatgagaagactttatcagaaaccattgagctaatacaaaaggattctagacactatgctaaacgtcaacttacatggtttagaaataagatggatgtaaattggtatgatattatccaaaatccacaagagcaagcaaagatatatcaaaaaattgaaaactggttaggtgttaaaaatgaattggaaagatgattttaaaccggaagtaaaaagaatcattgaagaggttgaaaaacaaattcaaccacgactaagtgagattgatgatcaagtaacttttaatcaacggaaagtattagaagcctttcaaaaggaaagaatttccgaagaaaatttaaatggagcgactggatacggttataacgatatgggaagagacgctctagaccgagtttatgctgatgtttttaagacagaggatgcgttggttcggccacaatttgtttctggaactcacacaattagttcagcctattttggaatgctgcgtcctggagataagttattatacttaacggggatgccttatgatacgattcaagaagtgattggcgtcactggtaaagcaggaatgggttcattgaaagactttaaaattgatttcgattacgttcctttgttagaaaatggaaaagttgattttaaagctgccaagactaagttgacggatcaagttaaagtagtagcaattcaacgttcaagaggttactctagtcgttctagttttactgttgatgaaattaaagtgatggtagatcatgttcgggagattttacccaatgctattatttttgttgataattgctatggtgaattttcagaaatagtggaaccaactgaagtaggcgttgatgtcatggtaggttcattaattaaaaatgctgggggtggaatcgcccatactggtggatacgttgttggaaagcaaaaattaatcgagatgattgctaatcgtttaactaatgttggtgcaggtaaggaagagggagctaccctagaaaatcttcgcagaatgtatcaaggctttttcatggcccctgaggttacgggagcagcaattaaaggcgctatttttgagagcgcaattttagaaaagtgtaatttacaagttgatcctaaatggaatgatccacggacggatttgattcaaacaattaactttggtgaaccagattcaatgattcgatttgctaagcaagtacaaaaaaattcgccaattgattcatatgttgatccagagccatctcaaatggctgggtatgaagataaagttattatggcagcgggtacctttgttcaaggagccagcattgaattttctgctgacggaccaattcgcccaccatatatactgtatttacaaggtggtctaacttattcacacgtaaaaattgcaatcactaaagccgttgaagaaacgttctttaactgatgttagaaaatgtaacatcagctattgacgtagctatcattgactgttaaacttagttcaatattaaaggggttattggtatgagtgaaaaagagcttcgtcgctcgatggctgttttaccgattggtacagttatgaagttaacatctcttactgctcgacagattcgatactatgaagaaaacgagttagtttttccagatcgaagtgaaggaaatcgacgtttgttttcgttgaacgatattgatcgattgcttgagattaaagattttattgcagaaggtttgaatattgctgatatcaagcaacgctttgagcaacgaaaagaagaactgaaacgctccatttcggatactcaaatgcggaaaatcttaagagaagaattacttcaaactggaaggctatcggatgattctggcccagtctttccaattaaacgagtttagtataaaaaaataaagtggggcgttacatacagttatggcaaagaaaaattattcgcaagcagatattcgtcagatggcaaaggatgaaaatgtacgttttctccgattaatgtttacagatctttttggaataattaagaacgttgaagtaccaattagtcaattggacaaactattagataataaattgatgtttgatggttcctcaattgacgggtttgttcggattgaagaaagtgacatgtatttatacccagatctttctacttggatggttttcccatggggaagcgaacatggcaaggtggctcgcattatttgtgaagtatactcaaatgatcgtaaaccattcgtgggtgatccacgtaacaatttaattcgagtactccaagagatgaaggatgcaggatttactgattttaatatcggacctgaacctgagtttttcttgttgaaattagatgaaaatggtaaaccaaccactaatttaaatgataaaggtagttactttgatttagctcctgttgatttaggtgaaaactgccgtcgtgatattgttttggaacttgaaaatatgggctttgatgttgaagcttctcatcatgaagttgctccaggacaacacgaaattgactttaaatacgctgatgctttgaccgctgccgataacattcaaacctttaagttggttgttaagacagttgcccgtaaatataacctgcatgctacatttatgcctaaacctatggatggaatcaatggttcagggatgcatttaaacatgtcacttttcaataaggaaggcaatgctttctatgacgaaaagggtgacttacaactttctcaaaatgcttactggttccttggtggactattgaagcatgctcgtagttatacggccgtatgtaacccaattgttaactcgtacaaacgtttagttcctggatatgaagctccagtatacgttgcttggtcaggttcaaaccgttcaccacttattcgcgttccttcaagtaagggactctcaactcgttttgaagttcgaagcgtcgatccagctgctaacccatacttagcaattgcatcagtattggaagcaggcttagatggcattagaaacaagattgaaccagaagattccgttgatcgtaatatctatcgaatgaacattcaagaacgtaatgaagagcatattacagatctaccttcaacattacacaatgctttgaaggaattccaaaatgatgatgtaatgcgtaaggcattaggagatcacattttccaaagcttcctcgaagctaagaagttagaatgggcttcttaccgtcaagaagtgacacaatgggaacgtgatcaatatctcgaaatgttctagacaaatatctataataagagttataacacggttaatcgtgttgtaactctttttttgtgaagaatgtttaaatttattgtcgaattcctttatttatttgaaatttttttgtaacattagagacagaacgatagaatggagcgatatcatggcagatgaacgtatgaatcacgaagaatccagtcgggatattttaatctcgcaactgaaaaacaaggatcaatacataaacgaattggcggaagcaattgatcagcacaacgatttgcgcatttatcaattgctaggacctttgcgctatcgggatgaaattaacgatgctttcgacttggaatttggagaatatccatttgagttggtaaaggatcaaagacaagaattagcacatttcttgagtgataatttgattgattatttaatcgaaaaatttccatttttctattaccgcgaagttgaaaagggacaatttaaagtcttctttggtaattggtgggatcgccgtgaaatcgggacacttgatgcattgaatgttgaatatacactagacgaagaaaaacttgaaaagcttgaaaaagcattgaatattgatgaagcgggtaaaactttaaactcagaccaaatcaaccaattatcagctaaaaatgttgagttacaaaaagtggttaccgctcaaactgaacttgaagataagcaaaaagaattgatggaacgtcaaaacaacttgtcagataagggcggtttatttgaatcaaataagattaaagaagaacgccaacaaattaaggaagaacttgctaagatcgctgaagaagaagaacaagcggctgaggctcctgaacaaattcgtaataatcaaaagcaaattttagttctttccaaggaagataccacgctcagttttgaaattgaggctttaaagaagagtttcacgagttatagtgagttccgtgaaactgccgaccaactgtataaaaattatctcagtagcctattagacgaagggcaggtaaagtctaatggataacacaatcaatgaagataaaaaaagagcaacattatccgacaagttgctgaaagtacaatctgatttggatgctggattaagcaaaggtcgtagtttcgcagaattatttcgtactttaacaactacagatgataatgtcgagttattggatgctgcaaaaaaactttatgcgttcgtagttgatagcgatgcagttatttttcctcagaaatttgaagctagtgactattatttaatttttatgactcgcttaattgaattaagtggtttaaaaactaaactgggtctggaagttgaacaagaaaataattaccaaaaacttttccatacttggacagggactagccaaaagttccgttttaaaatggcaaataatcaggctgaatatgttgatcaggcaacgcaacaaactatttttcatttgagtttagatgaacggaaaatgagctttaatactgatacaattaataatttttattttctaaatcagcaagatgacgaagatagcttggttgacgagattaagttatttactaaatttggccaaattttagaagaagtatacaattttgaagttgactttaatatgtttgatgctcgtaataataaagtttatgagtttgatcaaactagcttaaatacagatattattgatgaactttttgtggatgctgctaaaaatggttttactttgctaaatgctgagaaactattgggagcatacctaaaattagataatcatgtagttttctcgatttttcaagagataccagcaaccgaccaatgggctattcaagttaatgataaaagtgaagaaaaatcattgtttgatatcttgaagcagtacgatttcttgaacgattggtatgttagaaatattgcagatttaaaattaaaaatgttattttaggtgattaagatggattgggcaaaaatgttgcaaacatcggttgcgttagaccgtgatattagatttaagcataacttggccaatagtatgcaagaccggattcaagaagcttatatatctttggatgttgaacttgcagaaatagctaatgctgcagaatggttcaaggtatggaaaactcatcgtggcaaacgcgacggagagttatcggtccatcagacggttttgaatgagtttgtggatgctactgatttttttctattgatggctaatttaaaccaatggaatcatttgatagtaattgaagatgaagaaattgataagtataaggcggattctcgtacgcccgacttatctctaatgtatttaaatattaagaaaatgttgttttcggcgtatgcgtataatcgaagcacagattatgtacatgcttggcatctgtttatgaagtttggtattaaaggcttaggatttactcctgaagaaattgaggaaagcttttttgctaaaaataaggttaattacgagcgtcaagaaaataattactaataggaaataacagaaaactcaaaatctgctctggttttgggttttcttttaattaataaaaccgtaaaatacggtcaataattgaagatttgtagttaatgcctctatttctaaaatgggattctttcaatgaatgaaaaaggtatagacaattaaagaagatggtttatgggctagtaaattgcaaagcaaagtttaagttaagatcataatgttttactatggctgcgaggtgtgaaataattgatacagaagcttactgttcacttctaaaatttaagttagctaaggaagtgataatgaatggcgtatactgatatttatggatttaaacacgaaaatgcaacagttattagtaaacaagacgaatttcatcgcgtttttattatcgaagatgaaaaacatcgtcgttttgaatgcttaaaagagcatcctgaggctacccataaagggccgtcgcattggaaactagccaagcaagatacaccgccagataattactgggatgtgttcgactcggatggaaaataattaatatagataaaagaagctaaatcgttaaaaatcggtttagcttcttttagtttaatggagaaattctagcgctctaaagataatcccataagatgattttttgtttgaacgtatatacatattttgtttttcgaaattaattaaattggccattaagataagctttggtggttatgatgataaggcctaatataattaaaataacacttaaccaatgcattgaacggttacgatattcatagtgagtaaagatgaacccatatcgaattttggtgttaaatacagtaatcaagattcctagcatgaaaataaaaacaccaattaaaataatgacatccatttctagcaatgctcctaaacttttgacttaatctagtaattatatgttagattttattcgattttttagtcgaagtcacattaattgcttagtataaagatttaaaaataaaaatcacccaatctaattaaagattgagtgatttttatgttgcttagtgagcgtttggtgagcgctcttgttttaaaagcctataccatagggcttctaagctagattaatatgattcgggagagattcgaactctcgaccgtccgcttagaaggcggatgctctatccagctgagctaccgaaccgtacttaaacagtatatttaaaaatgaccgttctgtcaatggaattattacaaatagagggatgaaaaaagtggatataaatcgcaattaacaaagcaatttcaacattataaattaaagaaattaaacggggttaaacgctttaattaatttgaattattaggtattattaaattagaagttaacgaatagagggtggcttaaatgaaaaaaattatctcggttttactttcgctgatggtagtaacattatttatgagtgcgtgcacccataataatgtttatggcacggtagtggtgtctcctgaaaaatacaagcaaatttcagcagataagaagttgattgagaagactatcagtggtctagaaaagtttaattctgaaaacccagaaacagaaaaatcagtgatgagatctctagatgctttgattaaaaagggccaaaggaaaatgaacgatagtgatcgagtaaaatttgaggcacttttaggcgatcataaaaatggagttaaagggatcgttaagaaagcttacactcatcaacggggttttgatgatgacttgagtggtaggattaggtcaaatatgttgaaatcaattaaattaatgacgcatggaattactaaaaacgaaaatgatcgaaaaaaaatatataaacaagttttagaagatactaaagcagataaaaacctatataaaattggcggaaatgaataaaaaatgaggacaacgaagcaacattatttatatgatgcttcgttgttttttgttgcttatatttatgttaatatacagttcttaattattagaatattactaaatgcggatacatgggtatttttgcacatatttcaataaaagcataaattttaatatattttaagaaataaaatgcgcgaaaatcgttcatttgtagaggtttatacggtatcatggacattaagggtataatccgcatgttattcaaaaagttagtttattgtaaaaaagtttccattggattaaactctaaaacgtgaatcaagcgtttataaatgtgaggtgctgaatatgaaggaagatcctagaattattaagacattaagtaaattgcaaaaggcttttgtgatgttattgaagacatatgacgctggagatattaatgttaggcaaattagtgatgaagctggggtaacccgtggagctttttattcacatttttctgacaaaaaagaatttgttaattttacgattaacgaactagtgggctctttatttaattcatcattaaaggattcagttggatttgtcgatgaggttaatcacaaaaatactcatggaaccaatgtactatcagtctccaacttttttgataaagttgcagcagattatcaaacgtatacgattgtattagatacggaaagattgcctcagtttaccgaggtgcttaaagaacgtttgaattcagaaattaaaacttttgctgaatattacggcaaaaaggtaaagcatgatggttttcccattgaagttttaagctcatactatgtaaatggtctaattggaatgattagaatgtggcttgatgaaggaatggtatacacttcacattatatggcaaatgcggccaagaaaattttaggaacaaaaattcaaattgatagtcaaaatattgacctttccgattttttcgtagattaacattgactattatttaaatctacagtatagtattaacgttggtgtggtctccacgctacaaccgcacaaagtgagttttaaagcatagcacttactttggcgagtcttagaattaaggaggtgcacgttgtgtacgcaattattaaaactggtggtaaacaacttaaagttgaagaaggtcaatcagtattcgttgaaaagttaaacgtcgctgaaggcgaaaaagttacttttgatcaagttctttttgtaggtggcgaatctacaaaggttggttctcctgttgttgaaggtgcttcagttgctggaactgttgaaaaacaaggtaagcaaaagaagattactactttcaagtacaaggctaagaagaaccaacatacaaagactggtcatcgtcaaccatatacaaaagttatgattgattcaatcaacgcttaatttgattgaaggtgatgtggcatgatacagacttgtttttatagagataaagatcgaatcagtggttttaagataactggtcatgctgattctggtgagtatggacgtgatatcgtatgtgcggctgtgtcagtcttatcgataaatacagttaacagtatcgagcaaatcactaagataatgccactagttgattcagacgatgaaaatggtggatttttatctgttaatgttcctgaaagcagtgatgttgattcgaatcgaatggctcaagttttacttgaggcacttgagattggattaagggatattagtaagtcatacaaagaatatctagtaatgaattaatttattcggaggtgtaattaaccatggaaatgaatctacaattcttctctcatcataaggggggcggttccacttctaacggccgtgactcagctggtcgtcgtcttggaacaaagcgtgctgacggacaagctgctaaggcaggtatgattatctaccgtcaacgtggaacacatatttaccctggtgtaaatgttggtcgtggaaacgatgatactttgtttgcacttgcagatggtgtcgttcgttttgaacgtaaaggtcgcgacaagcgtcaagtttctgtatatccagtagcagatgctgaataagctttaaaaaagcaaatttcaggtcgggacaataactttgttccggccttttttaatgattttcttgttaaaaagagaatcgattgatatcattagttctagaattaattggaggaatctttttatgagtacaatttcaacatctgattttaaaaatggtttaaccattgaatttgatgataatatttggcgcattgttgaatttcaacatgttaagccgggtaaaggtagtgcctttgtgcgtactaagttgaagaacttaagaaatggcgctgttcaagaaaaaactttccgtgccggcgaaaaaatggaacaagctaatattgagacaaaacgtatgcaatatctatataatgatggtgctaactacgttttcatggataacaatacgtatgaacaagttgaaattcctaatgaacgtcttgaagaagagaaaaattatttagttgagaacatggaagtaagtatcgcattctttggtactgaaacacttggtgttgaagtgcctaagaatattactttaaaagttactgctacagaacctggtattaaaggtaatactgctagtggtggctcaaaaccagctacaatggaaactggtctggtggttcaagttcctttcttcgttaatgagggagatgctcttaacatcaatactcaagatggtacttatatttcacgcgcttaatttttggaggcaatataatggcagatacgaaatacttggagttaagtaattctagttcaaagagtggcgggattgcgatagcacctgatgttattgaatcaattgcaggaattacggttgatcaaatcgatggtgttcacttaattggtaataatatttcgaagggcttcaatacaattttaggacgtgattccttgggattaggtacaaaattaattgaagatgatcgtggcttagtcattaatgttagtgtaatgcttgattttggggtatctgttccacaagttgctactaagattcaagatcgagttaagcaacagatgttgtttatgaccgaaattgtgattaatgaagttaacgtgcaagtcaacggaatgatgccagatacgacaacatctgatattgatcccgatgatattttttcagaaaataatggtgataaatagtgagtttaaatcgacatcaaattcgagagagcgcctttaagattatctttgctaaaagtgctaatccagacgctgatctaagcgaattgcaagatcaagttttagaagaatttcatgagacagaagcccccgatcaattcttaaaagatttggttatgggagttagcttaaatcttgaagctgttaatgaaatgattagtggagagttgaaaaagggatggacagtaaaacggttagaaagtcctgaccgcgttatattacagatgggtacttatgaaattaagtacactgaaacaccagataaagttgcgattaatgaagctttggagttagctaagaagtatactgatgaagacgctcgtaaatttatcaatggagttttatctaatatcgcaaaataattaaaaaatggttgtgaatatcacttgatatttacaaccatttttaatttgtttaagatttaaaaagaaaatgcatcttatgatatgatttaagatgggtaaatatttgaaacggaggagtaataatgggccaaattattgatggaaaaactttagctgctgagattgataaacaaacaatgactgaagtacaaaaattgaaaaatcaaggtgttgaaccacatcttgttgtggttctagttggtgaaaatccagcaagtcaaatttacgtaagaaataaagaaaagcgcgctaataagttaggcattaaatcaacgctagttacgatgaatgccgatattagcgaaaatgaattgctcctaaaaatccaagaattaaatcaaaccgaagatgtgaatgccattctggtccagatgccactccctaagcatattgatgcttttaaagtaacgatggccattgatccgcgcaaggatgttgatggctttcatccagttaacgtggggaaacttttcgaaggaaagacgcaacacacgcccattgcatgtacaccgcaaggaattatggagatgttccaaaaatatcatatagatattcaaggtaagcgtgcagtagtggtgggacgtagttcgattgttggaaaaccaatggctgcattactattgaatgccaacgcgacagttacattggctcatagttatactaaagatttagccgctctgactaaagaagcagatatcttggtggtcgcaacaggtattgcccattttattaaagaagatcaggttaaagaaggcgcagctgttatcgacgttggtatggaccgcgatgaaaatggtaaactaacgggagacgttgatttcgagaatgtcgaaaaacatgtttcatacatcacccccgttcctaagggcgttggtccgatgacaatatcaatgttaatgaaacaaacggtgaatttaactaaatggagtatttaaatgcaagaagataagtatttaacggtcagtgcactaaccaattatattaaacgaaaatttgatgctgatccgtatttacatcgcgtttatttagtgggggaaatttcaaactttcgcttaagaactaacagtcaccaatattttagtttgaaggacgaaaacgcgaagattagtgcgatcatgtttaaatctgcatttgcgaaggttaagtttcaacctgaagaaggcatgcgagtgattgtgagtgggcgaattagtttatacccaggaaatggtagttaccaaatttatgtggatagtatgcaaccggatggtgtaggagctttatatcaagcatatgaacagttaaagataaaattatcccaagaaggtttatttgaagcccctaagctaccaattcctaagtatccccgtaagattgcgattgtgactagcccttctggggccgtgattagagatattatcacgacggtgagccgtcgttatccgattgttcaactggttttatttccagctttagttcaaggtaatgaggcagccaatagtatagctgcacaaataaagatgattaatacgttggatgattttgataccatcattattggccgaggtgggggctcaattgaagatttatggccattcaatgaagaagtagttgctcgagcaatctttgcaagtaagttaccggttatttcctctgtcggacatgaaacagatacgacaatcgccgatttagttgcagatatgcgggcagcaactccaacggccgccgctgaactagctacccctgtactgaccgatatcttagaagagcttcaaaaactccagctacaaactattggggcgtttagaaatattttaaaaatgcgtagccagcaggttcaacatttacaacaatcgtatatttttcaagaacctcaacgcttatatgaaggttatgtgcaaaatgttgatattttaacggaaaagttgatttcgttggagaaacaacaaattactacagctgagggatcatttaaaactctaaattcacgattgttagccaatactccagctagtagaattaaaatggcaaaacaaaatgttgagcatctacgacagatgaccaataataatataactaatcgtttttcaaagtatgcgaatgatttgaattcgctgattggatctttagatactctcagccccctcaagataatgagtagaggttatacttatgtaactagagatacgaaggtcgttaaatcgattgaggatttatcaattgacgataaaattcaactgaattttagtgatggtagtgcaaatgcagtaattaaaacaattaacagcgaggataaataatggctgaagaaaaaacatttgaagaaaatttacaagaattacaacaagttgtttccaatttagaacaaggtgatattccattggaaaaagctttgacagaatttcaaaaaggaattcagttaagttcggaattacaagaaaccctaaaaaatgctgaaaaaactcttacaaaagttatgcaagacaatggtgaagagactaacttagatttggggacagacggagaaaatgaatagtaattttgatgactttgtcaaacaaaacgtagaattacttgatcagcacatcgatgaattgtttgatagtgattcaacattgaataccgatttaaaaatgatgatgaagtattcaattgacgctggtggcaagcgagttcgtccgttagttttattggcaattttgaaagcattcagaaagacccctaattacgatatcctaacagtcgcagcagctctcgaagctgtacatacatactcgttgattcatgatgatttacccgcaatggataacgatgatttacggcgtggacgaccaaccagccataagaagtttggtgaggcagaggctatcttggctggtgatgcacttttaacggtggcctttcaatggattagctcaaccaatttaaaggatcggattaaaagtgaattggtgttagccttggcaagtgatgctggggcttcagggatgattgctggccaattattggatattcaaggaaatcagcgacattattccttagctgaactcaaacatttacatcatcttaaaaccagcaaaatgctattattcccagcggaagcggcgttgataatgaagccaagcaaacttcaagttgccgaattggttaaagattttatggcaaactttggtttagcctttcaaatccatgacgatataattgatgtaacagaaagtacagcgatccttggtaaaacggctggaaaagatgtagatttaaataaaaatacgtacgttaacttactcgggttaagtggagcaaaagaagaattaaatcaggttcttcaaaaatgtgaacaagacttaacctccttaggtgaattacagccagaaatggatttgatgattttagaaggttttttaacgtatttaaaataatggagaattaacgatggcaaaagaacgcgtagatgtattgctgatagaacagggactttttgatacccgtgaaaaagcaaaaagagccgtaatggccggagaaattttaggagacaacgaggagcgtttggataaacctggtgtcaagattgacccttcagttaagttacatttaaagggtaaaccaatgccctatgttagccgtggaggcttaaaattagaaaaagcattgaaagtctttggccttgatgttaaggggcttacagtattagatgtaggttcttcgacaggtggatttactgacgttatgctccaaaatggtgcgaagcttagttatgctttagatgtaggaactaatcaattagtatggaaattacgtgaggacccacgagtggtggtaatggaaaatactaattttagatacagtaaattagaagactttactgagggacaaccagagtttgcatcaattgatgtttcatttatctcattaaaactaattttaccagcgcttaaaaatattattaaaacgcatggatcagttgtcagcttgattaaaccccagtttgaagccggtagagaaaatgttgggaagcatggcatcgttcgtgaccgtaaagttcatgaagaagtccttaaaaatgtactagcaatggccaatgcggaaggtttcaacgtaaagggacttgatttttcaccaattaagggtggagaaggcaatatcgaatttttagcctggcttgaacgatccgatacggatcaaggagtgattgaagagaatgttgatacccaaaaagtgattgatagtgcatattccaacttaaattcataggtgaaacaatgcgaaaaaacgaccgacatgaactaattaaacaaattatcaacgaaaatgaaattgatcgtcaagaagatatcgtacttcacttgcaggagcagggcgttgaagtgacgcaggcgaccgtttcaagggatattcgtgaattaaaattaattaaatcacccactaaaaagggtggagtacgatattctctccctaaaggggatacttcccaaattgaacaacgactttttacgttattaagttcggctttgatttcaattaaagttcaggaaaaatttgtgtttattgatttaaagccaggaaacggagctagtatttcagcaacgctaaaacaggtccactatgggtttgtttttgcagcagttagtgatgacaatggagtgctagttatttgtactgatgatgaacatgcagtccgattaaaggatcggattacacaatcaattgcttacatctaggagaattagatatgttattggaattatctataaaggatttcgcaattatcgagaagcttgatgttagtttcaaccaaggaatgactgttctgacgggagaaactggggcaggtaagtcaattattattgatgccgtaggacttttagctggtggaagaggctcagcagattttgtaagaaccggcgcagacaaggcggttctacaaggtgtttttgatatcgctgagattgataatactaaaaatgcgttaattaagttaggaatcgacgcaaccaatgatttagtgattactcgggaactccataagggtggtcgaagtgtttgtcgaatcaatggcacgatcattaatctaaatagtctaaaatcagtcggagaaactttaattgatattcacggacaaaatgaacatcaagaactaatggatagtgaaaaacatctagcattgttagatcattttgacgaaaaaatggttggtaaagtccgtgctaaatatgaagaagcttacgctgattattttaaattaaaccaacaattaaataaaagtcgtaagaacgaacatgaatggaatcaacgcgttgacatgttgcaatttcaagtggaagaaattaagtctgccaatttaatggctggtgaagatgaggaacttgaaaaaagacgggatcaattaaacaactttcaaagtatttccgacgctctttcaacaagttttcaacttttggaaggtgaagatggggcctctgcgattgatcaaattggtagcgtaatgcaagaattacaaagtatttctgattatgatgatgagtaccaacaagtttctgatgaggtacaaagtgcctattatgctttagaagatgtaactaatcgagtccgttctgcgcttgatgcgatggaatggaattcaaatgaattagacgaagttgaacaaaggttagaagtagttcgtcagctaaagaaaaaatatggtaattcaattgaagaaattcttaactatttgaataaaattgagaatgaactcaatgaaatgactggttcaggaaacaatttggatgatcttgcccaggaagttgaagcgaggtatcaaaaagttaaaaaattaggaactcaactcacggaaatgcgtcaaagaatggccttagcattagaagcagctatacgtgaacaattgtcaggtctttacatggaaaaaacacaatttaaagtgcaatttactcctaaagctgaaccagatcgaaccggatttgatggggtagaatttttaattcaacctaatcctggtgaagatttgaaacctttagcaaaaatagcgtctggcggagagctctcacgaataatgttagcgttgaaaactatttttgcgcgtaacgaaggggttactagtattatttttgatgaagttgataccggagtaagcggccgtgtagcacaagcaattgcagataagattcatgaaatttcggcccattcacaagtattgtgtatttcccacttaccacaagttgcagctagagcagatcatcagttgcatgtggccaagaaagtggtctatggacgtacaatgacgaatttaacagtgctgaatgacgaaggacgggttaatgaaatcgccaaaatgttagccggggttaatatcacggaattaagcttagaacatgctcgtgaattattaaaaacggaacaagcccactaaaaaactcttactagcaaattgaaagatatccttgattcttagggatattttcggtttaatggtgagagtttttaaattaaggcgatgcttcgaatttgttgatcttctaagagttgtgttagcccagttttaggatcagtcaggcatagtcgtccagatctggtaatctggatatagccatcgatttcaacgattgatttttttaaatccagttgcatgcggactactaggtgattttgaattgaatatgccagggtatcattaatttgatcaatgggcattgtacgatccataattggtaaaccttggtcttcagggaccaggaataagttattatacattttacggatgttattgagtgagtgattaattcgattgaaagagttattaaattttttgttttccatgttagcctccaacgaacatttgtttgtatttacattatacgaacatgcgttcttaaaagcaactgtttttatgaattgggtataaatgttggtgtagcgctaacgattctgtagtggggaaattcaagaaaaataaaactcgaaaaattagcgctgatgtgataaaaaagcgaacaatttaaaaaagttaaaagtttattaacatggtactttaattttcaagtcaattgtggttgaaaaatataataaaaaagtgcaaaatagaagttacatatatattttgaggagtttgttcatggctagaagaggaatgttgattgttctatctggcccttccggtgttggtaagggaacggttagaaaggcaatctttgatcaaggcggtaatgattttcagtattcaatttcaatgacaactagaaagcctagaaaaggtgaagttgatggtgaagattactactttgtctctaaagaagaatttgagaaaaatatcaaagaaggccaaatgctggagtatgcccagtatgtagataattactatggcacaccattaaagtatgttaatcaaactctagattcaggacgagatgttttcctagaaatcgaagtgaacggtgctcgtcaagttcgtgaaaaaatgccagacggggtatttttattcttgactccaccagatttgatggaattaaaacaacgtattatcaatcgcgggactgaagacatggatacgattaataaacgaatggaaaaagcagttgacgaaatcaagacgatgcgtgattatgattatgcagtcgttaacgacaagattgaaaatgcggttgaagaaattaaaaatattatcaagggtgaacatcttcgagtaaccagagtttatcctgaatatcaagaaatgttaggagaattataagatgattttatatccttcagtagatgatttactagaacgtgttgattccagatattcattgattatgcttgctagcaagcgtgcacaccaattggatgagggtcaaccagaattactagataaatacacttcacaaaaaaatgttggcaaagctttggaagaagttgttgctggcgatgttatcattgatccaaacgaaaaagatttatagaaattatgaaagatggtggaggttgtcctctagcatcttttttgttggattaatcaattagtgggattggtattcaaggactggtaaaatagcagaaggaggttgttcgatatgaaaattttatttgttattactggcggaattgccgaatataaagtggttgaagcggtacggtttcaaatcaaaagtggtaatcaagccaaggtagtgatgacgcaaatggccaaaaaattcgtcacaccattaacgtttgcaacacttaccaatgaccttgtctatgatgattttgaaattaatacggaaaacccagttgctcatgtagctctggcagactgggcagataaaattgtaatcgccccagccacggctaattttattggaaaaatggcgaatggaattgcggatgattttgcttcaactgtagtgattgcttcaacagcaactaagctgttgctgccagcaatgaatgttaatatgtggaataatccagcggttcaacggaatatcgaacaattaaaagtagatggagtagtcgttttagaaccagctgttggagagctggctgaaggttattctggaaaaggacgttttccggatgctgaaatcgtaaatgcctttatcagcacgccccttgaaaagcgggaaaatctctttaaaggaacacacattgtggttactgctggggggacgcgtgaagcgattgatcccgtacgttatatttgtaatgaatcatctggtaagatggggtttgcgcttgctcaagtagcagaacggttaggagcgcaggttactttaatttctggacctacaaacttagttttaccagcgaaatcaagtattcaacggataaatattaagagtgtagcagacttacaggccgcccttgatacagcagtacaagatgcagatatattgataatggccgcagcagtttcagattaccgcgtggcgaaaatagcagatcataaaatgaaaaaagatgattttaatggtgaactggaaattaaattgattgaaaatcctgatattttagcgacactaaaacgtccagactcacttcgatacgttgtggggtttgctgcggagacgaatgatttaattgaaaatgctcaacgtaaaattcttaagaaaaacctaaatatgattgtggctaatgatgtaggtaatccccaaatcggttttgaatctaatcagaatgctgtcaccattctacgtccgcaccaagctaatatagaattgaaaaagaatgataaatcgataattgctgaacagattttaaagctaatcgaccaagaaattaattgaaaggaacgtaactcatggcaaaaaaatttaatgtcatcgtaaatgtcccagctttacaaactaatacaccatttacatatatcgcaaatgatgccattaaaaatgacattaaaattggttccagagtaattgttccttttggtaagtctgagcgacctatccaaggttttgtggtcggagaagaaaccactaatgaatttgaaggattgaaggacatcatttcagttttagaaccggaaccattgctaaataaagaattgattgagctttcagagtggttagccgaccaaacgtatgcttttcgagtaagttgtttaaatgcaatgcttccaagtttggtgaaagttaataccaagcgttttattaaaatcaatgaaacaaaaactacaatggaaaccgtgattgccttattaggggaagaacaggttacagatcttaaagtaaatgaactcagttttagccaacaaaaacaacttaatcagtggattaaagatgaattcgttacattaaaatatgtcacggaagattctgctaaaaagaaaatgattaattggctttggcctacgatggatttaagtgagtatgaacaagaacaaaaaaagttaagaaaaaatgctacgaaacaagttgagttactaaatataattaaaacgttagatgtcaaaaagggaatttcgcaagcttcaattttaaatgattatggtgtaggacgctcaacattaaatacagcggttaaaaatggatggctagttcgtaaggcggttgagcaatatcgcgatccttttgaaggacgtcagatgcagcttgatcaaaatttggctttaaatgaagaacagcaatccgcttacaacttaattacacaagcaattgaagacaaaaatgctaaaccaattttagttgaaggcgttactggatcgggaaaaacagaagtttatttgcagagtatccaacaggtaataaaaaaagggaaaactgctcttttactggttccagaaatttccttaacacccttaatggtgaaaagagttcgggcgcgttttggtacacaagtggctgttctccatagtggactttctgacggtgaaaagtttgatgaatggcgaagaattgtacgaaatgaagttaaagtagtagttggagcacggtcggcggtctttgcaccactacgtaatattggtattataattattgatgaggaacattcagaaacgtataagcaatctgatgcaccgcgttatcatgctcgagatgtagcgattcatcgtgcaaagaaatttgaatgtcccgtagtcttgggaagtgctactccttctcttgagagtcgttctcgcgtggaacgtgggcgatacgattttgtaaaaattcaaaaacgagccaatcaaaaggctttaccgaatattcaagtgatcgatatgcgtcagcatttaggtgatggatataatgaaaacttttcggcacccatggttgaagaaattcgacatcggattttaaggaaagaacaagtagttttaatgttgaatcggcgaggtttttcatccttcgtgatgtgtcgaacgtgtggttttgtcctaacttgtcctaactgtgatgtatctttaacgatgcatatggattctcgaaccatgcggtgtcattattgtggtcatgaagaagcaatcccacgtttatgtaaaaattgtggtagtgataaaattcggtttttcggtactggaactgaaaaagttcaacagcaattggcagagatcattcctgaagctcgcgtacttcggatggatgttgataccacccgtcgcaagggagcccatgagcgtctattagaacgttttggcaaccacgaggcagatattcttttgggtacgcaaatgattgctaaggggttggatttccctgatgtaaccttggtaggagttttaaatgcggatacagcattagaattaccagatttacgggcaagtgagcgaactttccagcttttaactcaggttgctggacgtgctggacgtgctgataagaccggtgaagtactaattcaaacctttaaccccgatcactatgcaattcgtttagctcaaaaacaagattatgaagactttttctataaagaaatgtatttgaggcatttaggcaaatatccgccttattactacacggtattagttagtgtttcagatcgggatgaaagacaagcgttaaaaaatgcttacgaaatgttgaatattattcaaccgcagttatcagctaatgcaattgtgttagggccgacggctaaatctatctcaaaaattaaacaaaaatattactatcaaattttaattaaatatcaaaaagagcctaaattacatcgtgcgctgttagaagtattgaacaaatcgcaggagaaatttagacaggggacacggattagtattgattccgaaccacaaaactttttgtaatatttaggaagtaggtctaattatgaaatcaattatttttatgggaacaccagaattttcggcgccaattttgcaaagcctaattgacgagccaaactatgatgtgattggggtagttacccaaccggatcgcaaagtcgggcgaaaacatgttttaacacccagtccagtaaaaaaagttgctgttaaaaacgatattaaggtttatcaaccagagaagttaagtggaagtactgaattgacagaactaatcgcgttaaatgcggatttaattgtcacggctgcttttggtcaatttcttccaatgagtttgatcaactccgttaagattggggcagtcaatgtgcatgcttcattattaccaaaatatcgtgggggagcacccgtgcactatgccataatgaatggcgacaaagaaactggtgttactattatctatatggttaaaaaaatggatgctggtgaaatgctcgctactgcaaaaattcctattaccgaccaagatgatgtgggaaccatgtttgaaaagttaagtcttttagggcgtgatttattgttagacacgctacctcaattaattgaaggaaatgttcaaccagttaaacaagatgaagaacaagttagcttttcgcctaatattagccccgaagaagaagaaattgatattaatttaccggcccgtctagtagatgcaaaggtccgcggattacgacctttcccagtagcctactttatgatggaaggcaaacgaactaagatatggaaaacaaaagtaatagatcaaactacagatttaaaaccgggtcaagttgtttcaaaaacgaagcatgagctcttgatagcaactggagaacacgatgtaattagtattgaagaattacagccagctggcaaacaaaagatgacaattacagactatctcaatggggtaggcgaaaacttacacccaggaaagcaaataatagataatgacaaatcaaaataatagtgcacgaaatttagcggttgatattttagaaaagattgatgaaggttctttttccaatattcaacttaatcaagatataaaaagttcatcattgattgatattgataaaaatttgttaacagaaattgtatacggagttttacaacatcgactcactcttgatttttatttagctgattatattagaaaaccagagatgactccgcgctgggtcattaatctactaagaacagctgttttccaaatggagtttctagatcgtgtaccggactttgctatttttaatgaatcaattgaaattgctaagcttcggggcaatgacggtatcagaaaaatggtgacgggtgtgctacgctcgtatcagagaaatggtaaaccaagttttgattcgatcaaaaatccagtggaaaaattatcgactcaatatagcgttgcgccttggattgttgatcaaatgttatacgaattgggtgaggaaaaatgcatttcgattttgaagagtattaaccaaccgtcccatcttgcggttcgtattaatcgttggaataaaacacatgcggatattattaaagatttagaatatgagtatacggtaacgacaagtgcaattgctaaagatggtttacgccttagtagaggggctagtatttccgatacaagaagttatattgatggtgatttgaccgttcaagatgaatcagcaatgttagttgcagaaacgatgcacttagagaaggggcaaaaagtactagatgcttgtgccgctccgggggggaagacgacccaaatagccgcaatgattggtgaaacaggagaagtaactggatgggatatctatcaaaaacgggtgcaattaattcaagataatgcacaaagaatgcatctagacaacgttaaaactgaggttcaggatgccattgcatctcgtgaagatttagatgaaagttttgatcgaattttagtagatgcaccatgttcgggaattggtttgatgagaagaaaaccagaaatccgttatcttaagagcaagaaagatagtagcgaccttcatcaactccaattaaaaatcttggataatattgctaaaatgctcaaagtaggtggcgtactaacttatagtacatgtacaattttgcgtaaagaaaatcaagaaaccatagaaaaattcctagctatccatcctgaatttgaacaactcaaagttgaaacagctaaaaaaatcaagcaaaatcgagatgaattgagccttaatatttatcctgatgattttgaatcagacggctttttcatcgctaatttaaaaaaggtgaagtgattggtgttatgaaatatgcgtacctatctgataaaggacaagttcgagagactaaccaagactatgtaggaattttcaaaaatgattctgaagctattttaaccattgtagctgacggtgtgggtggcaatcggggcggcgatgtagcttccgagatggccgtttcacacattgggtatctatttgaaacttctgacgttaataatgttactgatgctaaaaattggttaattcgccaacttgctcttgaaaatcgtaaaattttgcaagcatctaagcactataaaaaattaaatggcatgggaacaaccatcgttttggcactctttttaggtaagcaagtgattgtagctaatcttggcgacagtcgttgctatttatatagttcgaaaaatgggttgaaacaactatcgaccgatcactccttagtgaatgaactacttcgtttaggaaaaattactcctgaagaagctcgtaaccatccagaaaaaaatgtaattactaaaactttaggaatttcagaacaagccgaagctgagattaaagtatttgatattaccaaagaagatgaattgctactttgcacggacggattaactaaatttgtttctgatgatatgatcaaaaatgtgttgatgagtacgcttagccttgaaaaaaaagctaatcagttagtagatatggctaacactgcaggtggaacagataatattacaactttaattgttcaagtagaagagggggatatattatgacccctaaccaaactttgaatggtcgatataaaattattcgaccacttggagaaggcggaatggctaatgtttatctggcacatgatttaattttagatcgagatgttgcggtaaaactggtccgttttgacatgcaagatgatgtttcagcaatcaaacgattccaacgcgaagctttatcgactacagaactggttcatcctaatattgtcggtgtttatgatattggcgaagaacatggaatgaactatttgattatggaatatgttgaagggcaaaatcttaagcaatatatcagagatcagtttcctataccacttggtcaagtagttagcctaatgagtcaaattttaaatggtgttcagacggcgcactatcatgggattattcatcgcgatttaaaacctcaaaatatcttaattgataaacatggaaaagctaaaattactgattttggaattgcgattgctaatcaacaaagtagttttacgcgaactaatacggtgattgggtcggtacaatacctatcgccagagcaagtacgaggacacattgctacgcaacaatcggatatttattcattaggaattattttatttgaaatgttgactggaaaagttccttttgaaggtgaaagtgccgtatcaattgcggtaaaacattatcaagaccagttacctttggtgaaggattttaatacaaaaattccccagtcattagaaaatgtggttttgaaagcaacagcaaaaaatccaattgatcgatataaaaatgttgccgagatggctgctgatttgaagacggttttacagcctgaacgggctaatgaaagcaagtttgtggaagattctttggtagaacatacgattgttttaaatcaagacgaattaaagcagggattagcaaaagatgaggttgaaaaaactcgaccaattaagttaaaaatgaacaataaaatcaattttgctaagaaagaaaaagcaccagatgctgaagaaagtcatatgcatcgctttaaacgtcgtcatccattacggagaagagctttatttatggcaatggccgcggtagcttttattttaggaattttgattgctttcaagttgagtagtccgcaaatggtacaggttcccaatttagaagatttaactcaaaaacaagctatgactaaactatcaaaagtgaatttaggagtcggaaaaataactaaagaagctgatgataaaacgagttataataaagtagttgaaacgcttccacaaagtggaaaatatgttcaagaaggaatcaaagttaacattgttatcagtaagggaccgaacagttttgatgtcgataattatgttggaagtgattatagtagcaccaaaaagcaattggaagctaaaggatttaccattaaaaaaagaaaaatagttaccaatcgtttcgataataatcgcatcatctcccaagatgttgtatctggtcaagtggttgtgccacgagtgacaacaattacgtttacggttgctaattaacggaggacgcatgcatactggacaaattatacaattattagcaggattttatgatgtgttaacagaagaccataaaatcgttaggactcgggcacgaggtaattttcgcaatcaaaaaactagcccgttagtgggtgatatggtcgattttaaggaaagtgaaaatgatactggatacattaccaaaattcatacgcgtgaaaatgagttggtgcgtccgccattagctaatatcgatcaagctgtaattgtcactgcagcaactcagcccagcttttcggcaaatttgcttgatcgtcaattagtggcattggctgaaaaacatattgaggctattttgtatttttcaaaaacggatcttttaagcccaacggagtttcaagatttacaaaaaattgccggctactaccaaaaaattggctatcaagtgatttttccaattagtagtcaacctgatgctgatttaatcgaattgaaagagtcatttaaaaatcaactaactatttttatgggacagactggtgcgggaaaatcaacgctcttaaatcgaattgattcaaagttgaatattgccactggagaagtttcacaggcattaaatcgtggtaaacacacgacgcgtaaggtttctttgattcccattgaagatggtttagtggctgatacaccaggtttttcaacttatgcagtttttgaaatggctgatacacaattaaaagaatattttattgattttaagaagctcagccaaaattgtcgttttcgagaatgcttacatctaaacgaaccgggatgtgcagtcaaagcggcagttgaagacggtagtgtgctaagcagccgttatgctaattatgaacagtttatcgaactgattcggagtcaaaaacctgaatataagcgtaaaggttatcaaaaaaaggaccggaggaagaagaaatgattaaagtagccccatcaattttaagtgcagacccagctaacttaatgggtgatattaataaagtagaaggagcggactatcttcacgttgatgtgatggatggcagcttcgtacctaacttaagttttggactaaatacagttcaaggattgtcaaaagatacagatatcaaattagacgtacatttgatgattcaaaatccagaaaactatgttgaacaatttgttaaagccggtgcaagtattgttggtgttcatgttgaaagtactcagcatattgcacgagcaatccaaattatcaaaaatgctggagctcgcgctgaagtagtagttaaccctggaactccattaacagaattagaagaactattacccgaaattgaccaagttttgattatgtcggttaacccaggttttggtggacaaaagtttcttgaaagctcaatcagcaaggtgaagcgactatctgcattacgccaagcacgtggattagaatttgatattgaaattgatggtggaatttcagacaaaaatatcaaagcggtctatgatgctggcgtagatgtagccgttgctggttcatacgttttcggcgctgaagattacaccaaacaagtgcaactattaaaggaacttacaaaataatgaaaatttttaacttattagttggtggagctccagaaaatttacctgataatttaaatgattttgaaggagattggattggagtagatcgtggagctttaaaactgattgaaatgggtttaataccagaagtagcagtaggagattttgattcggttaacgaccaagagtttaaagaaattgaagctaatgcaaagcaagtaattaaactagatccagttaaagatgatacagatactgaatcaggattaaaatatgctttagatcatgatcctcgcgctcatattcgcgttttagggattagtggaggaagattagaccatttacttgccaatgtattaatggtcctccaagaccgttttagaatgtttgcagagcaaattgaattaattgatcgacaaaataatattagattttttaattctggcaaacatacggtcgacaagttggaaggttttaaatatttatcttttatcccattaacgcaaatcgatgttttaacgttagatgatgaaaaatatgaattacataatgcaatggtttcaaatgctcgtgcttatgttagcaatgaatttatcgattctaaggcgactgtttacttgagtaacggattggtagcagtaattcaaagtaaagattaagacaaaataaaaaaaagattggttatcaactaaccaatctttttttatacgcgtgtaactttacctgattttaaagctcgagcagatacccaaacacgtttgggcttgccgtcaactaagatacgaactttttgtaaatttggcttccagcttcggcgactgtggttcaaagcgtgtgaacgagtatttccgaagcgagtgtgcttacctgtgacaaaatcttttgccatgtcgaaaccctcctttgtcacttctatatttttatagaaatctttttcaatcaccataacaatttatcatattgcccgctatattgcaataggaaactttcaagtaattatccttgacactcaaataatccgttacgttttcaaaaaggttgtcacttaaaaaaatttattagaataaatgaatatcctcggtataataataatcagtatccaattcagatgtttgctcttgtatttaatgcatgtatgggatatggtaaaatatcgttggtatatatgaatactaaggaggcaggggtatggctgtcaagataaaaacaaaaaatggaacaattaacgtttcaaacgatgtaattgctactgttgttggcggagccgcaactgataattatggggttgtcggaatggctagtaaaaaccagattcgtgacaacataaatgaaattctaaaaagagaaaattacgctcgtggagtagtaattaaacaagaagcaaatgggatcgccatcgatgtttacattatcgttggatatggtactaaaatttctgaaatatcaaaaaatgtacaatcaaaagttaagtacagcctagaatcaatgcttggcatttctgctaattcggtcaatgtttttgttcaaggtgtgaagttgctcaacgattaggttcgttgaactaggaggataatgaatttggaagcaataggaacattgattactaatgaagtttttgatcagatggtgcaagccagttctgatcgtttaaaaatgaatgcggattttattaattctttgaacgtttttccggtaccagatggagatactggaacaaatatgagcctttcacttgaaagtggcgcaaagtatgaaaatgacgatgctagtttggaagtagggcatttagcggcttctttagctaaagggctcttaatgggagcacgtggtaactctggggtaattttatctcaaattttccgcggatttgctaagagcgttgaaggtaaagcaacgcttaatgctgaagatttagccgaagctgtcgcagaaggcgcaaaaacggcttataaggcggtaatgaagcctacagaaggaactattctaacagtggttcgtgaagctgctaaggcaggtaacgaggcagttaaaacgactgatagtttagccgaagttatggacgctattgatagtgctgcacaagcagcccttaaaaagacgaccgatcttcttccagttttaaaagaagtaggcgtagtagattccggtggtcaaggtttagtatttgtttttgatgcgtttaatgacgttttgaatggtaatgatattactgaatacaagcatgaaccggatgctactgaagtaaatgaaatggtagatgctaaacaccatcaaagtgtacaaggaaaaattaatccagaagatattgaatttggatattgtactcaaatgatggttcgaatcggaaaaggactgcaagttactaaggagttcgattacgatactttctacgattatctagctaagatgggtgattcattactagttatcaatgatgatgaagtggttaaggtacatgttcataccgaacatcccggcgaagttttagcttggggtcaacaatttggtgatattaccaaaattaaagttgataatatgcgttggcaacaagaagaaatcatagaacaagatgaaacaccaacagcatcatcagcctcaaaagaagtggctcctgaaacagctgtaattgcaatttcatcaggtgcaggtatctctaaattatttactagtttaggggtaacgcatatcattagtggtggacaaacgatgaatccaagtaccgctgatatcgtagccatgattaatgattcaggcgctaaaaaagcgattgtgttgcctaataataaaaatatttttctagctgctgagcaggccgttgaggtagctgatattccaactaagattatccatagccggacaatttctcaaggaatggcagcaatgcttgagtttaatccagatgttgatttggaagaaaatgcagaagcgatggaatctaacttggacactgtcaaaagtggacaagtaacaattgcggttcgtgatactaaattggacggacgcgaaattcatcaagatgattatatgggattgattgatggtaaaatcgttaataccaatcctaaattgatggatgcaacggtcgaaatggttaaattaatgttagaggaagatagcgaaatcgttacgattatttacggtcaagatgctacttcagagatggcggaacagttgcaaaacgcaattttagatattgatgatgaccttgaagttgaaattcatgaaggtgaccagccagtttacccatttttagtttcagttgaataatacttataggtcggttattagccgacctatttttgatttacggagggaaaatgaaaagcttaacagactcagttcaagtgcttcctggagttggacctaaaagagtacaagcgttagccgaacttggtatttcgaccatagaagacttgattacttattatccatttcgatatgaagatttagccgctaaggaacctcaaaatgtcgttgatcaacaaaaagtgacatttcaaggggtggttgcaacccagcctacagtagctcgttttgggcgtcaaaaagtccgagttaactttcgtcttctaatcggtaatgagtccgttatggtaactttttttaaccagccgtggattaaaaatcaaattaatgctgatgaagaaattgcggtatatgggaaatgggatgctaaccgacggagtttaacaggaattaaaattattgatgaagaagcaaatcttcaacccgtttatcctgctaacaaacatattcgacaagccactattcaacaattagttacagatgcaattaaccaatacgaggaacaaattcaggatgttattccagaagaattgattactaaatatcggttactgcatcgattagcaatggtccaagcgcttcatttcccagcggatgatcaaaaaacacgggatgcccgtcgaactgcgatgtttgaagagtttttaacgtttcaaatgggattacagttggttaaatcacgtgaacgaattgaaaatggaacggcgattaaatatcaaattcaattagtgcgtgcatttattcaaaagttacctttcgaattaaccgatgcacaaaaaagagtaacgaacgaaattttggccaatcttaagtcccccgcccatatgaaccgccttttacaaggagatgtgggtagtggtaaaactgtagtggctgccatagcaatgtatgcaaccttgacggccgggatgcaagccacattgatggctcccactgaaattttagctgaacagcatgctaataatttaagtcgattctttgaaaaattagatgttaagattgcattattagtcggtggtattcgtaaaaaaatcagagatgaaatgctagcagaaatcaaaaatggtgaaattgatattgtagttggtacccatgccatcatccaagaagatgtccaatttaaaaatttaaggcttggtattatagatgagcaacatcgttttggggtacaccagagacagctactacgtgagaagggggcagctcctgatatattagccatgacagctactccaatcccacgaactttagctattactacgtatggagatatggacgtgtcaattattgaccaagctcccgcgggtaggaagcccattattactaaatgggttaagcgaggggaatgggaaaaagttttaacctttatgactaaggaatttgctaatggtcgccaagcctttattgtgaccccactaattgaagaatctgaagccatggatttacaaaatgcgatggaactttatcaagaattatgtgaattttttggagaaaaatatccgattgcaattttgcatggtaaaatggatggtgctcaaaaagatcagattatggcagatttcaaagaaggcaaatatatgggattagtttctaccaccgtgattgaagtcggggtagatgttcctaatgctactttgatggtaattcaagatgcggatcgatttgggttagctcaattacatcagctacgagggcgcgttggtcgtggtcaatatcaggcttattgtattttagttgcggatcccaaaaatgaagttggaaagcaacgtatgcaaattatggtagacaccaatgatggttttgaaatttcagaagcggatttgaaaatgcgtggtcaaggtgatttgtttggaaaacagcaatcgggggtccctgaatttaaagtgggtgatccggttgttgatttaggcgctttgcaaactgcccaaattgatgcggctaaaattgtaagccagccagcgtgggaccaagatccccgttaccaaaatttacgactttacttagaaaataaaatacaaataaataaaagtttagattaattaaaggagaagagttatgaagattgcagtggatgcgatgggtggagataatgctccagaggaaattgttaaaggggtaagcgaagccagaaaagctctaccagacgttgagtttatcttatatggaaaaaaggatgaaattgctaaatacatggacgattttagaaatgttaaagtggtccatacagatgaagtaattacaatggaagatgaacccgttaaagctgtgcgtcgtaagaaaaattcatcaatggttttagctgcccaagctgtaaaaaatggcgatgcagatgcaattttttcggctggtaacacaggtgcccttttagccgctggtttgtttattatcggacgtattaaaggacttgatcgcccaggaatgacaactactttgccaagtcttaaaggtgaaaatgataatttcactatgctagatgttggagctaacgctgaaagtaaagctaaaaacttgcatgattttgccattttaggtaacttctatggtactaacgtcatgcatgttactaatccacgaattgcacttttaaataatggaactgagtacgataagggagataagattcataaagaggcctaccaactacttaagaatgatagttcactcaattttgttggtaatattgaatctcgcgaattattaaatggaactgcagatgtagttgttactgatggttttacgggaaatgctgttttgaaaaacattgaagggacagccttatcgatgttgaaactagtcaaagaaacaattatgaacaacggtgttaaaggtaagatgggtggtctactccttaaatctgcttttagccaaattaaagaccagatggattattctaaacaaggtggagccgtattattaggtgtcaaagctcccgtagttaaggctcacggttcaagtaatgctaaccaagttaaaaatgctttggtacaagtacatgaaattgtagattcaaagctcgttaagaatttagcggattattttgagatgcatcttgaaagcatcaaacaagatgatgtagacaaagaaaacgaaaacaattaaaatactaaagatattcaataagtagaggagtctgaaaattgtcaaaagaagaaatttttaataaaattgctgaaattttagcagatcggtttgaattaaaaaccgaacaaattaccaatacactaaactttaaagaagatttaaatgctgactcaattgatattgttgagttcgtgttagagttagaagatacttttggagctgaaattactgatgaagctgctgagaacctagttactgttggggatgcagttgattatattagtgaacatcaggcttaatttcatatactaagagaactcggtgattaatctaattggtcaccgagttattcttatgtgctaaataaattaatagatttggaaaggaagatattcatgataaaagccttagaagatgacttaagtcagacgtttgatattcattttaataaccatgcgttgttagatgaagcttttacgcaagcttcttatgttaatgaacatccacatcaagaattaaaattttacgaaagaatcgaatttttaggagacgctgttttacaactaattgtctctgaatatttgtttaagcgttatcctaaaatgccacaaggaaaactaacccgtttacgagctgcaatggtttgtgaagctagttttagtgattttgccaaagaatgtcattttgaccaatatattcgtttaggtaaaggagaagaaaaatccggcgctcgccagcgctcatcacttctttgtgatatttttgaatcgtttattggtgctctttacctcgatcaaggtcgggcagctgtcgagcgttttgtacgaatcgtcattttccctaaattagacgaaggcaaatttgatcacattatcgaccataaatcagaacttcaagaattacttcaaaaaaatggagacgttgaaattgattatgaattagtttctgaagaaggacctgaaaatgatttaatctttacggttagtgttacggctgatcataaaaaactagcaactggaaccggacattccaaaaaggttgctgaacaaaatgcggctaatcaggcgctacaacttttacgtaggcctaaataggtattttaaatgaaactacgcacgattgaaatcagtgggtttaaatcatttgctgataataccaagattgaatttaaagatggtattactggaattgttggtccaaacggttcggggaaaagtaatattatcgaagctattcgatgggtgatgggggaaacctctgctaaaagtttacgtggtggcaagatgcctgacgtcattttttcaggtaccgaaaaacgcaaacccctttcaagagcatccgtaacaattatatttgacaattcggatcactttctagattctaaatttgatgaagtaatgattagccgtcgactttttcgaaatggagaaagtcaatatgaattgaatcgccaagaatgccggttaagagatattttgaatttatttattgatacagggttaggtcgtgaatctttctccgttatttctcaagggcgtgttgaatcaatcttcaatagtaagcccgaagatcgtcgagcaattattgaagaggcggcgggagttttagagtataaacaggataaaaaacgtgctgaaaatgaactagaaaaaactagtggttatctagaacgggttaatgatttaattgtcgagctggaaaaacaagttcaacctttagaggaacaggcagccgtcgctaaagattatgtacaacaaaagcgtcgctttgacattttagatcagacgaaattggttcgaaccattaacagtaattctgaagctcaaaagcaattagctgtccagcgtcaagaacaaaaagaacagctcgcccaattacggataaaatcggaagctttagctgaccaacgagaaaaaattaaaaaagtaataagtgaacaaaatcatcaaaaagatcagttgcaaattaaattggtcaaattaaatcgactagagcaacaattagaaggcgaacatgatttacgggtggaacggcaaaaatatgtagatcaagaaaaagaacgtttagtaagcgagcaacaagtattaaaaaaacaacttgtcgaaaagcaagccgctttagaagccgcccaaggccaactagcagctgtgcaacagaagttaactaacactaagcaatctttgaaagtgttagaaagtgaccaccttgaacaacaaaaagaagctttaaagcgtgaaattgaagatttgcgggcagaatatgttgatcaattacaggcattgacttcattaaaaaaccaatataattttaatcaacaagatcgtgaacgcgatcaacagcaaagacaaaaaatccaacttacgatggatacgttgaatgaacaaattaagcaacgaaaaaccgaatgtgaaaatttggagcatcaattacttactttaaaagatgcaaataatgttcaacaagagcgaattactaaactgattaaacaacgggatcgacttcaagcccaatatgaaaaggaacggcagcagtggttagatggttccaacgttgctcatcgggcggaaagtaaattagaagctcttttaaatttgaaaaacgaatatactggattttatcaaggtgttcgagcagttcttcagcaaaaagcacaatttagaggaatcgtaggccctgtttcagaagtaatgaacgttccagctgaatatacggtagctattgaaacggcgcttggtaaccaagttcaaaatgtggtagtagacacggatcaaacagctaaatcgattattgaatatttgaaaaaaaatcgtttaggccgagtaaccttcttacctaagaatgctcttagtcagcgttccattagagaagacactttacaaaaggtgaaagaaatgccaggttttgttggtgttgcagctgatttagtcaaagtgaaagatgataatcaagttattagccaatatttattaggaacaactctaattgtggatacgttgcaaaacgctttaataatttctaagcagattagccgccataatcgaattattacgctggctggtgatgtaattggaattggaggaacgatgactggtggagctactaaaggcaaccgaacgggggtgctccagcaagaccaagaacttaaaaagttacaagtacaagtaactgcgatgaaaaccaagctagcttctaaagaaacagaagttcaaaaaattctagaacaaggacaagcaattcaagctgagttaaagcaagcacttgaagaacaacatcaagttgaacaaaatagctcagaattaagtaatcaagttagcttagaaaatgatcgactaacggaattacaacggcgacttaaggcaacacgttttgagctatcacagattgacgataatgaaaatcaacaaaatgatttacctgctcaaattgcgaacttacaacaagaagtacaacaaattaaagaaaatacaacggctaaacaagatgaacttgcccttttagatgacgatgttgatgaacgtcaaaatcggatttcagaacttcgaattgaattggctagacttaaggaacaaacttcacaacatcaacacgaagtgaatacattacagactacaattaacgatgtgttagaacgaaatgatgaaattaaaattaaaattcagcaattggatgaggaactaattccagaaaatgatctaaaacacttagatattgatgatattaggaatcaattagctgaacagaaccaattatcagcgcaactgcaaaataattttgaacaaaatcaagttcagcaagatcgcattattgccgattatgagattactcagcgacaattacatcaagctgaatcgcaattaaaggaaatcgagggttcactcacattagttcaaagtagaattgaaatggccattgataagttaactcaagaatatgaacagacttttgaaagtgtgcaaaatgtgattattcaaaatattgaggatgaatctttagaacgagagttgaagctgcttcgtagaggtttaaacgaattgggtacggtcaatctcggagcaattgaggaatatgatcgggtttcaacccgttataatttcttaagagatcaaaagaatgacctggcagattctaaagctcaacttgaacagtctattgctgaaattgatcaggaggctggacaaagatttaaacaaacttttgatcaagttgcagaagaatttagctcagtttttgttaaaatgtttggaggaggtaaagccgaattagagttaactgatccggataacctcttgacaactggtattgaaattaaggctcagccaccggggaagaaattacaacgacttagtttactttcaggtggggagaaatcgttgacagcaattacgttgttgtttgcaattttacaagttaaacctgttccgttttgtattttagatgaagttgaagcagcgtttgatgatgcgaatgtagaacgttttgctaagtatcttaagaattttcaaggtacaacccaatttattgtaattacacatcgtaaaggtacgatgatggaagccgacgttttgtatggtgttacaatgcaggaatcaggagtttcaaaaatggtatctgtttcaatggatgaggcggaataaagaaagcaggtgtaataatggcatggttttttggtagaaaaaagaaaaaagaacaaaaggttgaacaagaaccaacttcacaggttcaatctgaatcaatcagtacaacagtgaagaaggattctttaagtgagactcattcagagagtcaaagtacaattgcgtcacaggctgctgttgaaaagccagtccaagcagtagaaacaaatcaaattgaggagcccacttcttcaacagaaggagcttcgacgtctgaagttaaaactgaaacacagactagttcagctccagataatgggttggatgaagcagaacgctatgaccgcggtttggaacgttcaaggaaatcatttggacaaaaattatcagccttatttacgaatttttctggagtagatgaagatttttatgatgatttggaagaaactttaatcgaagctgatgtcgggtttgatacagcacttgaaatcagtgaggaagttcgggatgaaatagaatttgaacatgtttcagatcctgaccaaatttctcaattaatagttcgtcgcttagtggctctgtatactagaaatggtagtgcagaagataatcatttggtctttagcaaggagggtccaaccgtatttctctttgtaggtgtcaatggcgttgggaagacaactagcattggaaaaatggccgcccgctttaaaggacgtggccgtaaagtcttgcttgcagcctgtgatacattccgggcaggagcaatccaacagttgcaagaatggggtaaacgcgatggagtcgatgtggtggctggtaaagagcaatcagatcctgcttcagtagccttcgaagctgttaaaaaagctaaagaagaaaactacgatttattactagttgatacagctggtcgtcttcaaaataaggttaatttgatgaatgagttggataaaattaagcgcgtaattagtcgtgaaattccagatgctccgcaagaaacgttgttagttttggattcaactacgggacaaaatgccttaacacaggctaaggcatttttagaaactacgaatgttacagggattattttaaccaagttagatggaacggctaaaggtggaattgtgttagcaattagaaatcaattacatttagcagttaaatacgttggtttaggagagacggtggacgatcttagtccatttaatccagaacaatacgtaagtggactctttaagggtctgatggaagattaacgccaatggaaatcgaaaaaaataatcgcattaatagcttgttggaattttatgaacagttattgactccaaaacaaaaggagtatataacactgtattatgcggatgattattcattgggggaaatctccgaagaatttcaggtcagtcggcaagccgtgtatgataatattaaaaggacggtaaatattttagagaagtacgagcagcaacttcatttgttaagtaattttgaagtgcgtaatgcaaaatttgatcaaattcgtgcttatattaatcaaaaatatccggaagatactgaattaaaacactttttagatgatctcgaaaaaagtgaagaagaataaagacggaggggctttaaatggcttttgagggtctaactgaacgattacaaaaaactttcactaatttaagaaaaaagggtaaagttactgaggctgatttacgcgatacaatgcgtgaaattcgcttagcgttgctagaagccgatgttaactttaaagtagttaaacaatttgttaaaaccgtccgagaccaagcaattggctcagatattttagatggattaaatcctgctcagcaaattgtgaagttggttaatgatgaattaatcaagatgatgggaacagaagatgcaccattaaataagtctcccaaaattccaacaattattatgatgtctggtttacaaggggctggtaaaacaactaccactggtaaattagcattaaaacttaaaaatgaacaaaaagctcgtccacttttgattgcggccgatgtttatcgtccagcggcaattgatcagttggttcaagtcgggcaacaaatagatgttccggtttaccaagaaggcacagatgttaaccccgttgatattgtgcgccatggtttggaacaagctgctgaaaataaaaacgattatgtctttattgatacagctggtcgtctacaaattgacgaaaagttaatgcaggaattggctgatattaaagcgttagctcatccggatgaaattctcctggttgttgatgcaatgactggtcaaaacgccgttaatactgcggaaggatttaatgaaaaattagatattactggggtaattctaaccaagttagatggtgatacccgtggtggtgctgcgttgtcaattcgctcagtcactggtaaaccaattaaatttgttggacaaggcgaaaagatggaagatttggatgttttccatcctgatcgaatggcttcccgtattttaggtatgggtgacatgttaactttgatcgaaaaaactcaaaaagatttcgaccaaaagcaagcagctgaaatgactcaaaagattcgcgaaaacacattcgactttaatgattttgtggatcaattgaatcaagtacaaaatatgggaccaattgaggatatcatgaaaatgattccaggtatggctaataacccagctatgcaaaatgtgaatgtggaccctaaggatcttgagcacaccaaggcgattgtatattccatgaccaaagctgagcgtgaaaatccagatcttctaaatcctagtcgccgtcgtcggattgcggctgggtccgggcgtcctgtggttgaagtcaatcggatgattaaacaatttaatcaaatgaagaaaatgatgaaccaaatgtcaaaaggaaactttaacggcatggaaggtatgttaggaaatggaatcaagggtaagttgtcgaagatggcaatgaattccatgattaagaaaaataagaaaaacaaaaagaagcggatgaagaaaaataaacgacgctaaaaattaagaggtttggttatacaactaaacctcttttttgttttctaataaaagatactaggatctctactaaaagtatggaaatagtaccctagaaaaattaatgccaaaaataaatgaatcaaaaacagaaatgattggtatagggcgtatttacatgagcatccagaacggtctttatgtgccggcgagggtgttttaatagtacaagaagataatgagtggacatttaagtctaataaaaagtgttaaatttaattaaatgggagttttttcgatctgttaaggaaaaacactttacatctattcgatttactggtatattattactcgtgattaaatagttggaggtgtcattatgtctgtaaagatccgtttgaaacgtatgggttcaaagaagcgtcctttctaccgtgtcgtagtcgctgactcacgttcaccacgtgatggtcgttttattgcccaagtaggaacatacaatccattaacagaaccagcttcagttaaacttgaagaagaagaaatcttaaactggttaaacaatggtgcacaaccttctgatacagttaaaaatattttctctaaagcaggaattatgaagaagtatcacgaagctaagtatacaaaataggtcatacctgaacgaagggcgtcgataaaacattagttttattacggccttctttttgtatcggaggataaaagatgaattactttaatgtagcaaaaattgtcaatacccgcggtttacgcggtgaactaaaagttatctcatataccgatttcccagaagagcgctttaaatctggtgctgaactacaaatttttaagactgaaaaagacgaaattcctgttcaaactgtaacagttaaaaacgctaaagaatataagggctcatttatcgttactcttgaaggaatgaattccattaacgatgttgaaaagtttaaagggatgattttgaaagttgaagaagatcaactccaagatcttgaagaaggagaattttatcttcatcaaattattggattagatgttattgagaatgaccaaaaaattggaaccatcaaagaagttctatcgtatggtcctaatgatgtttgggtagttaaacggcccaatcaaaacgatttgttgcttccatatttaaaagatgtaattttaaatgttgatttggagcaaggagcagttcaagttagtgttccagaggggttagattaatgaaaattgatgttttaaccttatttcctaaaatggtagaagttccattgcatgaatccattgttggtaaagcgattgaagccggtaagttaaatgttgacgtcactgattttcgacaatattccactaataaacatggaaatgtcgatgattatccatatggaggcggagcagggatgctgctaacaccgcaacctatttttgatgcgatggagcatgttaagagccaaaatcaccaatccaccgggcgggttattttagttgatcctggtggcaagcaatttaaccaaacgatggctgaagattttgctaaagaagaacatctaacatttatttgtggacattacgaaggctatgatgagcggattaaaacacttgtcgatgatgaagtatccttgggagactttgtaattactggtggtgagttagctgcgttaaccatgattgatgctacagtacgtttattacctgacatattgggaaataaagattctgcagtcgatgattcattttcaacgggtctacttgaatttccacaatatacgcgacctgaagattttcgagggctgaaggttccatcaattttgttgagcggaaatcatggaaaaatcgatgaatggcgacggacagagtctttaaaaaagacacttgcaaggcgccccgatctgttagaaacagctcagttaacaccggaagataaacaaatcttacgagaacttcaaacgcccgatttataaaatcgttataggctattaagtccaaaataattttgcacttaataatagaatatgttaggatattaattggtttgaaaaccaacaataacaatgttccgctggctccgggtgagttgatgaagattggcgaagggaagatttttaaatgaatctattaattgataagattacaaaggaccaactacgtagtgatattcctgaattccgtgcaggagatactgttagagtacatgctaaggttgttgaaggtgaccacgaacgtatccaattgttcgaaggtgtagttatcaaacgccatggtagcggtattagtgctacatacactgttcgtaagatcagtaacggtgttggtgtggaacgtacattcccactacattcaccacgtgttgctaaaatcgaagttatccgtcatggtcgtgtacgtcgtgctaaactttactacctacgtgcattacatggtaaggcagctcgtattaaggaagaccgtcgtaaggctttcaaataaagagcaaataattaaagaagatgagttgaaatccaagagggttttgattcatctttttttgtttgccacactaagaaaaattaatataactattttaaataactcgtaaaaagggtaatgattattttgtttttcgcagaagagtacgttatgaaaaatgttcttctggtgggagcattcttagtgttatctttgagttgagtattgtggtaaacaaaatgagtcgaaaaatatggtaagtgaaattttagaggtagaattaacttctaaagacattcgcgggcaagttcaattagatatttaggtatagattatcctgataaactaacggatcatgatagcttgtttgaaaatcaaaaagtatcactggaataaaaaaggaagtttctgcgtaatttacggagaaacttcctttttttaatttatttaaacttaactgccgtaccataggcagccactgactgcatatctgtgccaattgatccagaatcaaagcgcatcatcacgactgcatctgcgcccattttcatcgcattttctcgaaggcgatcgactgcaatattgcgggattcatccaacattttagtgtagtctttaatctcgccaccaataatattttttaaaccagcaccaatattacggaaaatgtctttagattgggtagttaacccaaagacttctcctaaaacaatatattcctgtccaggaattttttctgtagttgtaactaaaatttcgtttttcattatgatttctccttaggataaaagttcatttaggtaattactagggccttaggtaatgatatcccaaggcttgcttctcaactaattctacgaccccagaagccacaatggtggaattgttaagcaaatcctccgtggtaattttccgctgggttaacgaattttgacaaactgcaatcactatctgagacgtaagagcgtgacggatcttttctgcttctttgctattggctttaacgcccatcacagcatcaccattgactaagagctcaatctgattattgggagcaggataagcttgtgctagatggtttagattatttaaaaccattggccactttgccatttcatcaatatggacgatgattttcataaaattattctccttagtagattaagattaaaaattagaataatggataatcatagtataccgctaataatcctggttaagctactgataacgtgcgttacacaaacgttgtttttgtattcaattgctttagtagagggggaaaatgattaataggctgcacaaaccgcatgagatagggatttctagtacacggggttaactaatgtggttatgattcgtgaaaacgttttcgatattgtaaaaaagctgtaaagtgttgatatgtaggtctttttaggcttagtgataaaaataaattttttactattattattttttttgattgcgaaaagactaaataccgattattctttttattattccaataacgttggagtacagatcattaattactaggaggaaataataatttgagtattttaaatacaacagagattatggaactaattcctaatcgttaccccattctattcatggactatgttgatgaattagaacctggaaaatcaatcgtggcgactaaaaacgtcacaatcaacgaagaatttttccaaggacattttcctggtaacccggttatgcctggagttttaatcattgaatctctagcacaagctgcatcaattctgattctaaaatcagaagaatttgcaggtaagatagcatatctaggtgccattaatggtgctaaatttagacagatcgtccgtcctggtgatgttttaaaacttcatgttgaaatgatcaagaaaaagagaaacatgggtgttgttgaaacatttgcaatggtcggtgataaaaaagtttgccaagcagaactaacattcattgttggagcaactgataagaaagataaatagtcggtgaattgcaatgggattgagaataattgattcagcactatctactcctaaaaaagtcgttactaacgatgatttaactaaaatactggatacgtcggatgaatggatttcaaaaaggacgggaatcaagcaacgttatcaagccgttgaagaaactacttcttcaatggcgatagaagtcgctaaacagctcttagagaaatctaaaactgatccaagtgaaattgatttgattgtcgtggcaacgatgtcaccggactatatgtcgccatctgttgcagctatagtacaagggagcattgatgcaaccaatgcaatggcttttgacattagcgccgcatgtagcggttttgtgtacggcatgagcattgttaataatatgcttcatggaggaaagtttaagaaagcaatcttaattggtgcggaaaaactaacccggttgctagattggacggaccgtagtacagccgttttgttcggtgacgcagcggctggtattttggctgaaaatgattcttcgaactcttcatatttaatcaacgaaaaattgaatacatatgggaatatgggccagtatctaacggctggaaacgtagcagccttagatgacccagcacaatcgtatttcttccaaatgaacggtcgtaaagtttacgaatttgccactaaacgagttcctgaatcaattttgacagttcttcatgaagcgaacattgatcctagtgaggtaaagtatttcttacttcatcaagcaaatgaacgtattgttaaaagcgttgcgaaaaagttagatctatcaatggataaatttccagtcaatattggtcgcttcggtaacaccgcagcagccagtgaatccgtcttgttagcagaaatgttagcagatggaaaaattaatcgcggtgacattatcgtcttcagcggctttggcgggggcttaaccgtcggaacaaatgttatcaaatattaaaaaaataaattaaattatattctcggaggaataatattatgactaaagaagaagtattcacaaaggtacaagcagtaatcgcagaacaattggaaaaagacgcagacaagatcactatggaaacaagtttttcagaagacttggacgctgatagcttagacatttttgaagttgttgacaagttagaagacgaatttgatatcgatattgatacagacgaaaatatgaatactgttggcaagttagttgattacgttagcgaaaacatcgataagtaattaaaaaggggtaaatgatggttaaagcggcttatttatttagcggacaaggacaacaatttgaagggatgggaatggatctgtatcaaacagagccggcctatcgagcattagttgatgaagctagtcaaattttaggtcaaagttttgctaaacaagatgttattgataatgaagaaaatttacaattatcaattgttattttgagtttaggaattgcacgaattcttagcagtgaaaagattgcaccgcagaagttcttggggcttagcttaggtgaatattccgctttgattgccgcaaatggtttttcaattgatgaaggtttaaaagttcttgaagatcgttcaaaatacatggctgaagcagggaaactaaatccaggccaaatggtagcagttttaaatgccagtgatgatgtgatgaacgaggcaatgcatgctgctcgagagtttggtaaagtttatccagcaaattacaacacacctaagcaaacggttttcggtggcgatgctgctggaatcaacaagtttagtacactgttaaaagctgctggagttaagcgggttgttccaattaagatgagtgtggcatcacacacaccatttatgcaaatggctagtgataacttgaagacccgtttggaaaatgtcacagtagctcaaccgaatgtgccagtaattagcaatacgatcaagactgaatttactaaagctaatactaaacaaacccttgcagaccagttggtaaacccaacttatttcacggattgtttagctgtaattgaggcagatccaatcgattgtttggtagaaattggtcctggtaaagcgcttagtggatttgctaaaaaaactctcaagaacaaagacttaccaattttcaatgtttatgatgttgaaacactacaaaaattacggaactatctttcaaatcaggagggctaattaagtgattattaaagatacagtggcagttgttactggtggaactcaaggaatcggattagcaatcgcaatggatttagctaagaaaggttcaaaggtttttatcactgctcgccatgatatttcggatgatgcagtaaaagaacaaattcaaggacttgatatcaactttaaagaacttgacattcgtgatgatgcaaagattggcgaattgttaaacgacattaaagaagaatttggtcacttagatattattgtgaataatgctggaattacaaaagataagttactaagtcgaatgtcagttgaagattttaatgacgtaattgcaactaacttagttggtgcattttcaatgacaaaatatgccatgaaaattatgcaaaaacaacgttcaggtaacattgtcaatatctcaagtatttcgggaactcaaggaaatgttggacaagctaactattcagcaagtaaagctggaattgttggtctaacaaaaactacagctcgtgaaggtcttttgagaaatattagatgtaatgctgtggctccagggatgattgaaacagccatgactggaaaattaagtgaaaaggttcgtgaaaaaacagaagaaatgattccaatgcaccgtttcggtcaaccagaagaaatttcttcaacagtagcctttttacttgaaaatgattatataactggtcaagtacttaccgttgacggtggaatgaccctttaggtttttgaggaggaaaaaatgggtagacgagtagtagtaacaggcatgggagctttgactccccttggaaatgatcgtgaatccttcattcaaggactaaatagttcaaaagttggaatcgataaaattacacattttgatgccgaaccaacaggtatcacggttgccggtgaggttaaagactttgatccaactgttagaattgagagaaaaattgcgaaacgaatggatgcattttctcaatatgctctatattctgctgttgaagcaatggaacaagctgattttaaagaaggcgagttagatccttaccaagtcggtgtaatttatggttcagggattggtggattaactaccatccaagaacaagtcattaaaatggatcataaaggaccgagacgggtttcaccattatttgtaactaactcaattactaacatggcagctgggaacatttcaatgtatttcaatgcaaaaaataccagtcaagcaatcgttactgcttgtgctagcgcaaataatgcaattggaaatgcattccaccatatcaaaaatggttacgcagatgttatgattacaggtggttcagaatcatcaattaatgaaattggaatcgctggtttcgcttcattaactgcattaactgcatcagaagatcgtttacgtgcctcaattccatttgataaggatcgcaatggttttgtaatgggtgaaggagcagctactttaatccttgaagactacgaccatgctaaagcacgtggtgctaatattttagctgaaatcgttggttacggtatgacaagtgatgctttccatatgacccaaccagatcctgaaggtcgcggtgccattcgtgcaatgcaaatggcaatggacgaaggtggcattaaagccaatgatattgattatatcaatgctcatggtaccagtacgcatgctaacgatagtgcagaatcaaaagctatcgaaagcatctttactgaaaacgaccattataaggtaagtagtactaagtcaatgactggtcatttgcttggtgcggctggagcaattgaagctgttgcaactattgcagcacttcaaaatggtattatgccagttaacgtaggtttagaaactaaagaccctgaagttaacattccattagttacagaagataaccgtaaggcttctgttaactatgccttgagtaattcatttggttttggtggacataacgctgtattagcatttaagaggtgaaaatgttgactgaaatagatttagaaaagttattaaccaaattagataaatcatcattcacgtcattcgaaatgacggaaggtgattttagcattaaagtaaaaaaagaaactactcaagtagttcaaccagtagcaacggttaatgccgttgctactgacgttgaagcaacttctgaaatagcggatgctaacctagaagagattaaggctccgttcgtgggggtggtctattttgcaccttcagaaggagaagatccttatattaaggttggcagtcacatttcaaaaggcgatactgtgggcttaatcgaagccatgaagatgtttaatgaagttcattcaccagttgatggtgaagtcgtagaactcttagttgaaaatggatcgatggttgaatatgatcaaccaattgcccgtgttcgtaaagttggagataattaatggaaattaatgttcaagatattattcctcaacgtcctccttttcaaatgattgatcaattagttgatcttgaagcaggaaaaaaggcggtcgctgaaaagaaagttaccatcaatgaatggttttttaataatggcaacgagctctgcatgcctgagccactcttagtcgaggccttagcacaaacgggagcttgtgcacttttatcaaacgaagaatttgttggaaaaaatgctttctttggcggaattaaacaagctgaattttcaaatagagttgttcctggcaatcgacttactttaacggttgaattaaccaaaatgaaaagacaaattggtactggtcatggggttattgttaatgaaaataacgaactgatctgtgaagctgatttaactttcattgtgggctaggaacagggaggctatctatgtttcaaaaggttttagttgctaatcgtggtgaaatcgcggtccaaattatccgtgccttacacgaaatggatattgctgcagttagtgtctattctacagctgatgagaatagtttattcgttaaattagcggatgaagccgtctgcattggagggcctcaacctgctgattcatatttaaacatgtttaatattatcagtgctgccgtcttaactggctgtgacgcgattcatccaggttacggatttttatccgaaaatgcggaattcgctcgtttatgtaaagaaagcaatctggtatttattggaccgcactataaaaccattgacttgatgggaaataagtctcgagcgcgtgagacgatgattagtgcgaatgttccggttattccgggaagcaacggcatggttcgcgatttagagaatgccatggtggtggctaagcaaattggttatccaattatgcttaaagctgctgatggtggtggcggaaaagggattcgtcgaattaattcgtcagaagaccttaagaaagcttatcaagaagcgaagcgggaagctgaaacttcttttggtaattctgatttatatattgaaaaaatcattgaaaatgctaaacatattgaaatgcaagttattgcagaccagtttggtcattatgtatttttacctgaacgtgattgttcgctgcaacgaaataaccagaaagtaattgaagaaacgccatgcgccactatttcacattctgaacgcgaaagtttaggtgatattgtagttcgggctgcaaaggccatcaattattataatactggtacaattgagtttttgatggatgaaaatcataatttttatttcatggaaatgaatactcgacttcaagttgagcatacagttactgaagaggtaacgggaattgaattaatcaaagaacaaattaagattgctgaaggattgaaacttgatttcagccaagcagacgttgaaattttaggccatgcaattgaatgtcgaattaatgccgaagacccaagcaatggttttatgccatcggcggggaccattaagcatctatttttcccagatggaacaatgggtgtacgcattgattcgggaattacatatggtagcatgatcccaccattttacgattcaatgatttcaaaaataattgttaaaatgccaaatcgggttcaagcgactagaaaaatgcgtcgtgttttagatgaatttgaaatcgaaggtgtaacttcaaataaggcattcttagaggctttactagttgataagggatttgaacaaggattgtttacgactaaatatattgaaaatgtctttttgaaagagtggttaagtaatgcaaaataaattctcacttcctactcaagatgaaattgttaagcgattgaagaaaattccagaaggtttgtggcgcgaatgttctaattgtcacgaaaagttttattaccgtcgcgcagggatttatgaagtgtgtcctaattgtgggtatggtgcacggctaggttctcgtaaacgaatcaaattactttgtgatgagtttgaagaatgggacaaagcaatggctactgatcctactaatatagacgatgaaaagtacaaaaagaaactggctacagggattaaaacgactcacgttaatgaaagtgtcctcacaggaaaagctaaaattggtaacaatgaatttgctattggagtgatggattcacgctttatcatgggtagtttaggtcaagtgacgggaagtaaaattgcacgaatgttccaggaagcgactcggcaacatctaccagttattatgtttactgcttcaggtggagcgcgaatgcaagacggaattcattcgttaatgcaaatggctagggtttctgatgaagttgctcgtcatagtgcggaaggcttattatacattgcagttataaccgatcctactacaggtggagttacagctagttatgccatgcaagctgatattattatttcagaaccaaaaacattaattggttttgccggtcgccgagtgattgaacaaacgattaatcagaagccacctaaggattttcaacaagccgaaacgttacttaaaaatggattcttagatgatattgttgaacgaccaaatttaaaagaatatttgaataatcttttaaatttacattcagataagtaagtagggataaaaaatggcaaaaacagcatatgaaacagtgactgctgctcgcagtaaggataaagttgcaactgctgatttgataaataatattttctcgaattttacggaactccatggagatcgtcaattaagtgatgatcctgctgtgattggtggaatcgctctattgaacggtacaccagtaaccgtaattggtacccaaaaaggtaaaaataccgctgaaaatattgaacgtcattttggaactgttgaacctgaagggtatcgaaaagcagtacgtctaatgcaacaagctgaaaaatttaaacgaccagtaattacatttgttaacacaccaggggcttatccaggaatggatgctgagtatcatggtcaaggttcagcaattgctaacagtttaatagtggggatggaacttcgtgtcccttatatcagtattattgttggtgaaggtggtagcggaggtgcattggctctggctaccagtgatacagtttggatgatggaaaatagtatctattcagttttatcacctgaaggttatgcttcaatcgtttggaaggattctaaacgtgttattgaagcttctgaggctttaaaattaactccagaacatttacttgaagatggaattatcgataaaattgttccagaagttgttgatcaaactagtacacaaaatttaaaacaaatgttagttacagaagtaaatcgtttaagtcaattttcagctgatgaactcgtgcagcgacgacatgaacgatttagtaaattctagaagaggggttatgcagttggaaggaattcttagtggaaaaaccattgtcattatgggtgtagcgaataagaacagtattgcttggggttgtacaaaagcaatcatggatcaaggcgcaaaagttgtattaacttaccaaaatgaccggataaaaaaaagtttaaataaaattgtggatgattcaatcgcattggttgaatgtgatgtttcagaagatgccaatattgaaaaggcctttaaacaaattgaagataaatttggtaaggttgatggtattattcatgcgattgcctttgctgacaaggaaactcttgaaggtggcgttttaaataccaaaaaagaaggttacaatctagctcaagatgttagtgcttactcattgattgctgtttcacgctatggtgcggaaatcatgaacgaaaaaggtagtattgtgacgcttacatacttcggctcaactcgtgcaattcctaactacaacatgatgggaattgctaaagcttcacttgaatccagcgtacgctacttggcaagtgatttaggtgaccgtcatattcgagttaatgctatttcagctggtgcaattaagacacttgctgttacaggtatcaagcatcatcgtgacttgcttaaagaatctcaaagccgtacagtcgatggtgaaaatgtaagtactagtgaagttggaaatgtcgctgcattccttgttagtgatatggcaactggtgtaaccggtgatgttatttacgttgataaaggcgtacatttaatttaagctaaataaaaagattaaggtggttaccttaatctttttttgtatcctcaaattgtcagatatagatagattttttgagaaattgactagatgtaattgcgtttattaaaattaaatgatattattctaataataagtgaaatggaggttgttatatgaatcatcaagttaaatattttgctaatgttaatgtaacaaccactacctcaaccaccatcctgtctggttgagtgttttgaggtgctttccaattaaaatttggttaacaaacaaaaccacccaatcagaattcagtgcctactagcattgatactgattcggtggttttttatattttgaggaggaagaacaatgaaggaagatttaccgcagttaaaacgatcacttacatcaaaccaaatgcaaatgattgcattaggaggaaccattggtgtgggattattcatgggatcctcatcgacaattaagtggacgggaccatcagtgttgctagcatatggctttgcggggttaatattgtacctagttatgcgtgctttaggggagattttatatgtaaacccaagcaccggttcctttgctgattatgcaaccaactatattcaccccttagcaggatatttaaccatgtggagcaatatcttccaatttattgtagttgggattagcgaagtggttgcagttagtcaatatttgaattactggtggccaaatttaccagggtgggtttctagtgtggtggtaattgctactttaacgcttgctaacttggtttctactaaagcatacggagcgattgaattctattttgctttaattaaagtgctaacgattattttaattattattattggtgttttagtgattttcatgggcttaggtaatcattggcgccctgtaggattgagcaatctttgggctcacgggggctttttcacaggtggagttaaaggattcttgtttgcgttatcaatcgttgtaggctcttaccaaggaattgagttacttggtatcactgctggtgaagcagctaaccctaaaaaggccattgttgcttcggtaaaatcaattgtttggcgaattttaattttttatttaggagcaatctttgttatcgtagctatttttccttggaatcaattggctacggtaggttctccgtttgtggaaactttttcaaaagtaggaattaccggagcggctggaattatcaattttgttgttttaactgcggcaatgtcaggaaccaattctggaatttatagtgctagtcgaatgttgtataaactatctcaagaaggaaaggtacctaagatttttggtaaattatccagtcatcgagttccatctgtagcaatcttgaccatatcttttggaattttgttagggattatcttaaatatcttcttatcttcatttaaaggaggagccgttaacctatttgtgctggtatatagctcaagtgtgttgccggggatggttccatggtttgttatcctactttctgaattacgctttcgccgtgctaacccagaaataattcaaaatcatccttttgtaatgccgctttatcccatgagtaattacttagcggttttctcgttgtttttgattgtagtttttatgttcatcaatccagacacgagggcatcagttacagtaggatttgtttttctaatggttttaacgattaattttataattaaattccgccgtaaacggggctagaaaaaattcagaaagctaaagttctgaagcttttaatattttaaaggaaaagatattgctaaggtttacctaagaaataagctgaactttgataaacagataggggtctgctaaaatttaatagataaaaaattcaggattaagctttggaggattggttttgaaaattggaattgataaaatgagcttttttacgagtgatttatatttaccgatggaggatcttgcaaaggctcgtaatgaagacccaaataaatacttgattggtattggacaatcaaaacaagctgtaatccgaaattcacaagattcagtaacactagcagctaatgcagcattaaaaatagtagatgataacgaaaaagaaaaaatcgatttgattttattcggcactgaatctggtgtagataactctaaatcaggagcaatctacttacagtcattattgggaattaactcatcagcgagtggtgttgagctaaagcaggcttgttttggtttgactgctggaattcaaatggcaatgggacatattgctttacatccggaaagtcgagttttactagtaggatcggatattgctcgctatggaattggtacattaggagaaaaaactcaaggtggaggagcagtcgcgataattatgagcgctaatcctcatctccttgaaattggaacgcaaagtgcccatttaactaaggatattatggatttttggcgtccattaaatcgtagtgaagcgttagttgatggtaagtattcatcagccgaatttattaatttcttcaaagaaactttcgaaaattacctcgaaaaaacgggcgaagagattgataaatttaccgctcttgtttttcatttaccttacactaagatggggcttaaagctttaagaagcgtaattgaagacctagataatgatgatttaaaagaacgtttattagaacattttgaggagagtcgttatttgaatcgtgaggtaggaaatttatatacaggttcattgtatctgagtctgttgtcattattacatgcccgcaatttaaaagcaggcgaccaaattggcttgtttagttatggttctggtgcagaaggtgagttttattctgctaaagtcgttgaaggatatgaaaggtatgttacagatgaagaaattgcatttttggatcaaagaacttcggtctcagtggctgaatatgaacaaatctatcgtagttttatgaaacctcaaacagcggactacagaactgaatttgaaaacgatcctgcaccatttgttttgaagggacaacaacaacaacaacggatttatgaaaaagtaaattaaaaaaatggcaacttgggtttaaacctaagttgccattttttatgagaagatgctgtaaacaattttaccgtctttcgcgataatcatcgctttatttttgtcaggttgatttaattgaacggcatatcccttaccaagttcttttttgagggattttgaaacctcaacaaatttatcttggatatctttaaaattactattactcatttggtcaggattttcgatcaactgattgaaaacttttttagtgtctttatcggttgctgaaacactaaatgttttggcagatggatcatatgtaacagtaccaaacgatttaaaagatttagtaagactagcctggacttgttgcatctgttgggccttagatgaagaggcaacactttcgcttttaatcatttccaacttatcgtccttcaagctcgattttttactagcaattaaagttgagttggtcttagagccagaacttttatgtgaagtttccatcacatttcttgctgagaaaataacaacagcaagggggataatcactaaaagtgagcttaaaaaaatggagcctcggttcctaattgatgaataaaattgaaaaaatccaagtaataatgtaattgatgctaaaactaaaacgtaaagcatagtaaccctccaaaatgatttatcgcattaacaatagtatgctttgaaaaacataataaatcaataggaaagtcacatctagtagatgttatctctaaataaaccaacaactttaccgaggatagtcacgttgtccaaaataattggggccatcgtatcattttctggttgaagtcgaatgtgatcggattctcgatagaatcgtttgcaagttgcttcattttcatcagtcatagcaattacaatggtgccattgtcggctgtagattgttttctaacaataacttgatcaccagataaaataccggcattaatcatactttctcctcggatggtaagcatgaacaaattactactatcattttcgtactctggaggaacagggaagaaatctgtagcttcttcaacagccaaaattggttcaccggcagtaactactcccagtaagggaatagtaggatttttatcttgtactcctaaagcgtctaaacctaattttgttacctctagggctcggggcttagtaggatccttttctaaaaagccgtttttttgtaaacgatcaatgtgtccatgaacagtggaagtagatgatagtccaatggcactaccaatttcacgcactgtagggggatatccttgagcgttaactgttttataaatatattccagaacgctgagttgcttagtgctgatattttttgccattttttcacctcataaatatttgttgttattttatcataaaaaatcctaatactcaaacaaatgttcgctttaaaaattgaaattataagctttccatagtatgattaagctactaataacggagggatttattatggccgatcaagaaatgcaaaaattaattaagagaatcaatgaacttgctaaaaaagcaaaagaagaaggacttagtgacttagagattatcgagcgaaaagatctgcgtcaaaaatatttgaagaagttccgagagagtttcagaagtcaagttgaaatgatgcaaatttttgataaagaaggcaaagaagtcacacctgaaaaggtaaaagaagttcaacgaaaaaagggcttacgtgacgattagaacggggcttttgtttttagccgtttttgtgtaaaatgaataggtaagtcgttggtaaggaggattgtaaatgtcaactggaatttggattatgattgtaatcatcgcattgcttgttggtgcagttggtggtttcttctttgctcgtcgttacatggagaattatttgaagaataaccccccaattaacgaggatatgcttagaacaatgatgcttcagatgggtcaaaagccatcacaaaagaagctccatcaaatgatgactgcgatgcaaaatcaatctaagaaataaaaaaacgtccattatttggacgctttttttgtttctttattcgaaatgtcaatgtatttaaacgtaggatcaacctcattatcaagtttaacaaaagcattgtttaattcttcttctagcattgctaagttttcgtcattcatttttgttttacgatcaatagtaatcggttcactaaagttgatatgaatcttttgacgagtaaatagtcctttaaaggttaatggtccttgataaatagctggtacaatgggggcgttagctaatttggcaattacgaaagcaccatttttaagctcttgggaatgtcgagttcctgaaggaaaaataatggttgataattctcccttttttaaaatcttaaccggggttttaatggctgaaggacccggattttgacgatcaacaggaaaagcatttaatttagtaattaaccagcttaaaaaccgattttgaaagagttcctttttagccataaaagaaaatctttgcggataagcagctagggcatatagcactggatcaaaccacgtgcggtggggagctactaacacataactaccttctggtaaacgttctgagttgtgtacatcaggtttcccattaataagaaatatcaatgaagaaacaaagtgtttaataaatgaataaaacataagataacctgtactttcatatatttattaatttgattatattatgaagtattggtaaagaaaaggagttttaaatgcaagttgagttaaaaagtgacgagcgaattgatcaattatatcgcgatgatattcagattattcaaagtccatcagtattttcattctcactcgatgcggtattattagccaattttgctgaggttaaaaaggctagtaagactaaaattgtcgatctttgctctggaaatggagcagtgggtttatttctttcaaaaaagactgccggctatgtgacaatgattgagattcagtcacgattagcagagatggcaatgcggagtattcagttgaacgatttaactgaccgttatgatgtttacaacatgccgttgaaagatgcgttaacgaaaattaatgctgattccatagataacattgtttgtaatccaccttactttgaagatttacctagtagcaagaaaaatcccaatgaacatttggcacttgctcggcatgaattaacgacttcattagaggaagttcttcaggtgagtcaaaagatgttaaaaatgaatggaaaattatttttggtacatagaccggatcgactacctgaaattttaaccaaattagttaaaaatcgattggcacctaaacgaattcaatttgcacattctcacgcaggagatgaagctaatatggttttaatcgaagcgattaaagacggtaagcctaatggaactagaatcttaccaccaatagttatttatgaggggttggaatactctaaagcaattaaggagttattatatggaaatcccactgactaacggattttatttttatgttttacgctgtgcggataacactttatatggtggctataccataaatcttattaaccgcgttgaacgccataataagggacaaggtgccaaatatactaaggctcgaagaccagttcaattaatttattttgaatcgtttgataatcagcatgacgcaatgtctgcagaatatcagttcaagcaacgaacgcgaagtagtaaaattaaatttcttaaaaagaacggtatttcattaacaaatttaaaataatagtggtacagttaaggcgattaacgactaatttaatagtttgaatactgtaatattttttgaatcatgatacagtatgtaaaacaaattatttagccaagtctgagaggagaatttttgatgaaaattattgcttatggcattcgagatgacgaaaaaccttacctagaagaatgggttaaagataataaaattgaagtaaaggctgttagcgaattgttggactctaacacaattgaacaagctaagggttatgacggagttgttgcatatcaacagaaaccttatacagatgatttgttcgataaaatgaatgaattcgggattcatgccttttcgcttcgtaacgttggtgttgataatgttccagttgaggctttaaagcgaaataatattaagattaccaatgttccagcgtactctccaatggcgattgcagaactttcagtaacccaactcctagctttaattcgtcgaattccagaatttgatgttaagatggctcgtggtgatttcagatgggaaccagatattgctctagaacttaacaaaatgacagtgggagttattggtaccggaagaattgggcgtgcggccattaatatctttaaaggctttggagctaaagtgattgcttatgatgttttccgaaattcagaacttgaaaaagaaggaatctatgttgactcgcttgaagaactttatcgtcaagtagatgttattaccttacatgttcccgctttaaaagataactaccatatgttaaatgatgaagcgttcgcacagatgcatgatggggtatttgttctaaattttgctcgcggtagcttgattgacacgaaggcattacttaaggctttagatagtggtaaggtggctggtgcggcactagatacctatgaagacgaagtaggtatttttgatgtggatcaccaaaatgacccaatcaatgatcccgtatttaatgatttatacagtagacgtaatgtaaaaatcacaccacatgcggctttttatactaagccagcagttaaaaatatggtacaaattgctcttgaaaataataaagcactaattgaaaaaggtgctgcaaaaaatgaagttaagtttgactaatatttagcttgaaatgcgactttagttaggttaaaattatattcggcctgtaggtcaaaaacacacttgattggaagttgacggagtgctcaactagtttgagtcccgaaaccgtagataatcaaggaggaaaaactaggaggaaaataacatgtctgttatttctatgaaacaattgcttgaagctggtgtacatttcggacaccaaacacgtcgctggaaccctaagatgaagccatttatctttactgaacgtaatggtatttacatcattgatttacaaaaaactgttaaattaattgacaatgcatataacttcgttaaagatgttgctgcaaatgatggtgtagttctttttgttggtacaaagaagcaagcacaaactgctatcgaagaagaagcaaaacgtgctggtcaatactttgttaaccatcgttggttaggtggaactcttacaaactggaacacaatccaaaaacgtatcaagcgtttgaaagatttgaaagcaatggaagaagacggtacatttgatcgtctacctaagaaagaagttgctcttttgaacaagcaaaaagacaagcttgaaaaattcttgggtggtatcgaagatatgcctcatactccagacgtattgtttgttgttgatcctcgtaaggaacaaattgctatcaaggaagctcaaaaattgaatattcctgttgtagctatggtcgacacaaactctgatccagatcaagttgatgttattatcccatcaaatgatgatgctattcgtgccgttcgtttaatcactgctaagatggctgacgctgttatcgaaggtcgccaaggtgaggacgaagaagaagcttcacaagaagtcgctgaaggcgtaagcaaggactctcttgaagacttgaagaagtctgttgaagaaggaagcaacgaagaataattatcacttaggctgtcgtgatttgagaccttttaggcctgagattacgcgcggcctttttttacggaatcacaaattggtattagtaatataaaaagctaagggggccataaaaatggcaagtatttcagctaaattagtaaaagaattacgcgataaaatcggtgttggtatgatggacgctaaaaaagcacttgttgctacagaaggtgacatggacaaagcagttgattttctccgtgaaaaaggtattgcaaaggctgctaagaagagtgaccgtgttgctgctgaaggtcttgcagatgttgaaatgcatgacaacacagctgcaattgtagaagttaattcagaaactgactttgttgcatcaaacgatcgtttcatcgacttagttaaggaaattgcttcacaagttgcacttgaaaaacctgcagatgttgatgctgctcttaaattgaagtcaccaaagggtactttgaatgatgatatcatcgaagcaactcaagtaattggtgaaaagatttctcttcgtcgctttgctactttagaaaagggtgaaaacgaacatttcggttcatatcttcacatgggtggtaaaattgcagcgcttgtattgcttgaaggtgctgatgaagaaactgctaaagacgttgctatgcacgttgcagctatcaaccctaagtatgttaaccgtgaccaagtacccgctgaggtattggaccacgaacgtgaagtacttagcaaagaagctgaaggtgaaggcaaaccagctaatatcatcgaaaagatggttactggtcgtttgaacaagttcttggctgaaattagtttagatgatcaagaatatgttaaagatcctgaccaaacagttgctaaatatgttgcttcaaagggtggtaaagttaagtcatttatccgctttgaagttggtgaaggtatcgaaaaacaaactgttgactttgctgaagaagttcgtaaggaaatgggccaataaaacccagagtttttggatatttaaaaagcgaattaatatgagtttagctcaattaattcgcttttttgtaggattttacacgtaataacagtgtggtttgccgcatttttatgatagaattaatgaaggaaattaaacataggaggccgtaatatgtcggaagttaaatacaagcgagtaataatgaagctgagtggtgaagcacttgctggagataaaggaacaggtattaatccaccagtaattcaaaaggttgctgaagaacttcgtgacgtgcatgacctaggagtacaaattgccatcgttgttggtggtgggaacatgtggcgtggagaaactggtgaacagcttggaatggaacgtgttcaagctgactatattggtatgctaggtacggttatgaatgctttagcacttcaagatagcctagaatcactaggagttccaactcgcgttcaaacttccattgaaatgcgtcaaatcgctgaaccttacattcgtcgtaaggccgttcgtcatcttgaaaagaatcgcatagtaatctttgctgctggtacaggtagcccatacttctcaactgatacaacttcagctttaagagcggctgaaattggggcggaagcaattttaatggctaaaaacggcgtagatggtatttattctgccgatccaaacgtagaccctgatgcagttaaatttgacgaattaacacatatggatattattgataaaggacttaatgttatggacactactgcaagttcactttcgatggagaataatattccattagttgttttcaacttaaaccaagcaggtaacattaaaaaggttgttgcaggtgaaaatattggaacaacggttagaggagaagaataatggcaaaaaatgagataatccaaaaagctgaagaaaaaatgcaaaaggcacagaatgttttagaacgtgatctaggttcaatccgtgctggccgtgctaatgcttcattacttgataaagtttcagtggattattatggagctccaactccacttaatcaaatggcttcaattagcattccggaaccacgagtattattagttactccttatgataagagcgtattgaacgacattgaacaagctattttaatgtcagatctagggattaatcctgctaatgatggctcagcaattcgtttagtagttcctcaattaactgaagaaactcgtaaagatttagccaagaatgttaaagcagaaggcgaaaaagctaaagtagcagttcgtaatattcgtcgtgatgcaatggacactttgaaaaaggctaataaaaatggcgactacaatgatgatgaattccatgatttagaaaaacaaactcaagatagtacggataaagcaattaaagttgtagacgaaatcgtagctaataaggaaaaagaagtccttgaaggctagtattaacttttgataaagcaccccaagaattgtagtgaaaactcaacttttggggtgctttactggttattgcaaaattccaacttcaaccaaaaagtatcaaaatttggtatggtacaataaaaatcatgtgtttttaggtagttttgaagatgtttgacgtatctttaatagtcgttgtccgtttatttgtacagaacaatgattttgtagcttttttttggtaaaataataaccattagcttggaggttttttgatgaaaatgaatcaaaaacttgaaacagaattaaatgaaaatattccaaagcatgttgccattattatggatggtaacggacgctgggctcagaaacgatttatgccacgtgttgctggtcataagcgaggaatggaagtcgttaagactattactaaaagtgctagtaagttgggcgtaaaggtgttaaccttatacgctttttcgacggaaaattggaaacgtccccaagatgaagtttcattcttaatgaaattaccgattacttttttcaataaatttgttccagaattgattgaagagggggtccaggttcgagtaactggagatattgacggccttccccaagcgactcaagatgctgtacgaaaagcgatcaaggataccgcacaaggtacaaagatgattttaaattttgctcttaactatggaagtcgggacgaaattaccaagatggtccagtcaattgctcaagctgttaataccaaacaattggacgtggataaaattgatgagcaggttattgaaaaccatctacaaactaattttttaggcgaactttctaatccagatgtattgattaggaccagtggagaagagcgaatttcgaacttcttactttggcaaattgcatatagtgagttagtctttactgacacactttggccagatttcgacgaaaaaatctttattgaaatgataaaagagtatcaaaaacgtgatcgacgttttggtgcaattaaaaagtgaggaattaattttgaagcaaagagtaattactgccgtagtagcgttaataatttttattccaattgtctttcttggaggaacattaatcgagattgcagccttggccctggccgtgatggcaatgagtgaagttttaattatgaaacgaattttgttggtgactcctgaagcaatcattagtatcttaggaacgttattcttggttgcccctaagtcatggatgcacgacttaccgagccaaattaatacaccattcgtttctttgatttttgccattgcgttaatggtgagagttgttttcagtaaaaatcgttttaatttcgatgatgctggtgtgctaacattgacgatgctatacattggattcggatttaatatgtttgttcaagctcgaacggtgggcttaggaatgttaatgtatctgctactaaccgtttggagtacagacagtggagcctacttagtcggaagaaagattggtaagactaaacttgctcctcaaattagccccaataagacttgggaaggttccattggcggaaccgtagttgcaattattgttggaattattttctcagtaacgggactaatccattttggaattctagctacaattttaatgacgctattcctttcaattgcaggtcagttaggagacttagtagaatcttctcttaaacgttattacggtgttaaagattctggtcgtatcttaccaggtcatggaggaatccttgaccgttttgatagtctattgctagtattgccaatggcatatttattaggtttactataaaatttgccagttaggagttatttatgataactacgattattacctttattgttgtatttttaattttagttgttgtccatgagtatgggcattttgttgctgctaaaaagtccggtattttagttcgtgaattttcaattgggatgggtcctaaaattgttgatttgaagcgtaatggaactacgtatactttacggattcttcccattggtggttatgttcgaatggcggggctcgatgaacaagaagatgaattgaaagcgggacaacatgttacattaaccacggataatactggacaagtgacgattattaatacttctagtaaagttcaaaatttgatgggcattccagttgatgtaaccagttttgacttacaagataaattattcattgaaggttatgaaaatggtaacgaagacgaagttaaacattttgaaattgatcatgatgcatcgatagtcgaatccgacgggaccgaagttcgaattgcaccgcgtgatgttcaatttcaatctgctaagatttggcagcgactaattactaattttgctggaccattcaataattttgttttggccatcgttgtttttgcgataatgggagttatgcagggagcagttccggctaatactaaccaagtacaagtcgttgaaaatggtgttgctcaaaaagcaggaattaaaaataatgatcgtattgttagagttgaaggacaaaaaacagataattggagtcaactatctaaggcagtttcagctcgtccaaatcaaaaaacgactttagaagtattacgtcaaaagcaaacaaagaaaatcacattaacacctaagttagcaagtaatggtagtaaaaaagtgggtatgatcggtgttcaatcatccatgacaactaatttaggtaagcgagttttatatggtttcactggaacttggcaaatggctaagagtttgtttaccgctttaggacagatgctacatggctttagtttgaatgatttaggcggtcctgttgcaatttatgccacgacctctcaagctacccatcaaggcttcatgtcagtgctgtatgtgcttggttttctatccctaaacttggggattgttaacttattaccaattccagctttggatggaggaaaaattctcctaaatctcgttgaaatgattcgaagaaaacctttaaaagttgaaaccgaaaatgtgattacgctaattggctttggatttttaatgatattaatgctgttagttacttggaatgatattcaaagatactttttttaaattaacttaaggagttcaaattcaattatgaaacaatcaaaaattcttattcctactgtaaaggaagtcccaaatgatgccgaagttttaagtcataaaatgatgcttcgggcaggatacatccgtcaaatttcggccggaatgtatgcatacttaccattagcttataaagtgattagtaagattgaaaaaatcgtgcgtgaagaaatggaagcaatcgacgccgttgaaatgttaactccagcggttttaccagctgaattatggaagcaatcaggccgttatgaaacatatggtcaagaactctataaatttaagaatcgtcatgatcgtgattttattcttggaccaacacacgaagaaaccatgactacattgattcgagacgaagttaaatcatacaagaaacttccactttctttataccaaatccaaatgaaatatcgcgatgaagatcgtcctcgttatggattactacgcggccgtgaatttttaatgaaagatgcttattctttccacgccgatgaagaaacgttagaccaaagtttccgtgatttcgaaaaagcttaccaaaacatttttagacgttgtggtcttaacttccgtgaaatcgtgggtgacgccggagcaatgggtggtcgagattccaaagaattttcagctattgcttctattggtgaagatacaatcgcttactcagaagaaagcgattatgctgctaacttagaaatggcaagtagtgtctacacagatcttcaaatgcatgaaaatcaagaagaacttactaaagtggctactgatgatgcgcattcaattgatgaagttgctgctaagctagatgtggatagcaaccgtttaattaaaactatggctttaattgtcgatgaagcacctgttttggctttactacgtggtaatgatcaactaaatgaagttaagcttacaaatcttttgcacgctgatgaggttcgagaagcaacggaggaagaagcgtttgaacttctaggtgcgcacgtgggttcgcttggtccagtacttgaaaacaaaccagaaaatttaaagattgtagcagataaatatattgaacaaatggttaacagcgttgttggtgctaatgaagatggtttccatttgaaaaatgttaatgttgaacgcgattttaccgttgatgaatatgctgatattcgtactgtccgtgaaggcgaacttgctccggatggtaagggtgctttgaaattcactaagggaatcgaaattggtcatatcttcaagattggaacaaagtactctgaagctttggatgctaaggtactagatgaaaacggacgagcaatcccagtaattatgggttgttatggaattggggtgagtcgtttactatcagctgtttctgaacaacaatctgatgaaaatgggcttgtatggcctaagaatattgctccttatgatgtccatgtaattccagttaatgccaagaatgcggaacaaatggaaattgcggaccaaattaacggagaactaactaaagcaggttacgatgtattagtagatgatcgtaaggaacgtgccggagttaagtttgcggattcagacttaattggaatcccacttcgtgttaccattggtaagaaagcttctgaaggcattgttgaagtcaagttacgtaagacaggggaagcagtcgaagttaaggttgcggaactaaataacacggtagaaattttattaaaccaagctcaataaaagtaaataaaccaattaaagctggggaatcccagctttaattatttgtagcaaatatttttaatggattagtaacatcagggggaccaaagagtgagtttgtcagaaaatgaacaattcagagttttattagagcaaattgatttgttggataatgctgaattaaaagatggttcaatcaaagatttaactgtgcactccaattccaagcgttggacgtttagttttgagtttaatgatattttacctttacaagtctttgttgaatttcatcatcaattggttaatacgtttggggcaatagctcaaattgatttttcaattgatactataaataaaaataatgttgcaacccatgcaaccgattattgggattggattattaagaatagtggtattcaatcatcacttctacaagtgttatgtgataagtcaattccagagtttaaagatggacaattagttgtcaaagtagataatcaaattactaagaactttctcaatgacgatgttttgcagactcttagtaatacgtatcaaaaagttggttttggtccgattaaaattaaacctacaatcgatgacaatactgctcaagaacgtttgcaagcttatcatgaagaaaaaattaaacgtgatcaagccattgttcaaaaagcgactgaagcaattaaaaaagctgaaagtaaaaagaaagcttctgataaagcgatgcctgaatttaatggtaaagtgcaaatgggtaaaccaattaatggtaaggacaatattattcagttgagagatattacccaagaagaacgttcggtgtccattgaagggtatatttttgacgcagaagttaagacccttcgttcggagcgtcaacttttaatctttaaggtaacggactatacatcgtctattaccatcaagaagttttctcgtaatgagaccgatgaacaattattctcggccattaaaaaaggtttgtgggttagagttcgcggaagtattcaagaagatagttttatgaaagatctaacgatgaatgcttacgatatcatggaagtcgaccacgctgatcgacaagatacagcaactgataaaagagttgaattacacatacacactaatatgagtacgatggatgctactaacggaattagcgatttggtaggacaagctgctaagtgggggcatccggcggttgcagtcacagatcacgctggattacaagctttccctgaagcccatgcagctggtaaaaaaaatggtattaaaacacttttcggtgttgaagctaatctagttgatgatggagttccaattggctataacagtgaacatcgcccattgaagggcggcaaatatgtaatctttgatgtggaaactacgggtttgtctgcaatttatgacaaggtgattgaactatcggcggtcaaaatggaaaatggaaatgtaattgatcagttcgaagaatttattgatccaggttttcctctttcggaaactacaattaatctgactagtatcacggacgaaatggtacgtggttcaatgtctgaaaaagaagttttcaccaaatttagagaattttatgaagatgctattattgtgggacataatgtaacttttgatattggttttatgaatacaggttacctccgacatggaatggaagaaataaaaaatcccataattgatactttaacgttagcgcggttcttgtatcctactctgaaaggttatcgtttaaacactttggctaaaaaatttggggtagtactcgaacatcatcatcgggctatctatgattcagaaactacaggacatttgtgttatctcttcttaaaagatgccgaagaacgttatgggattgaatatcatgatcaactaaatgatcacatgactgaaaatgaagcatataaacatgcacggccaagtcatgccattttaattgctaagacccaagcaggtttaaaaaatctttttaaattagtatcaatgtcaaatgtcaaatattactatcgtgtacctcgaattcctcgctctgagttagaaaaattacgcgaggggattattgtcggttctgcttgttctagcggggatgtttttacgtcgatgatgcaaaaaggatatgctgatgcacggcgaaaggctaaattctatgattacttggaagtaatgcctaaaccggtttatcaaccattaatcgaacaagaattagttagtgataataagaagttagaggaaatcattgccaatattgttaaattaggtgaggatctagatattccagtggtcgcaacgggagatgttcattatctcaatccgcaagattatatctaccgtaagattttaattaattcgcaaggtggggctaatcctttaaatcgttcagaattacctgatgttcattttagaactaccgatgaaatgctggaagacttttctttcttgggtccagaagtagcacacaagattgttgtcgaaaattcgaataaaatcgctgatagtgtagatgacggaattagcccagttaaagataagttgtatacacctaaaatgccaggtgctgaagaccgaatcaaacagctttcgatggatcgggcacatgctttgtacggtgaagtattaccggaaattgttcaagaacgattaaataaagaattgactagtatcattggaaatggtttctccgtaatttatctaattgctcagcgcctagtgcataagagtaataaagatggttatttagttgggtcgcgtggatcagttggttctagttttgttgctacaatgtctggaattacagaagttaatccattaccgcctcattatcgatgccctaagtgtcaatattcattcttctataccaagggtgaatatggttctggatatgaccttccagataaagaatgtccggaatgtggaacttggatgattggtgatggacaagatattccgtttgaaactttcctaggtttcaaaggagataaggtccccgatattgatttaaatttctcgggagattatcaacctattgcgcataattatatgcaagttttatttggtaaagataatgtgtttagagctggtacaattggtacggttgctgataaaacagcatttggatatgttaaagcgtacgaaagagatactaatcagcatttgcgcggagccgaaattgaacgtttggctaagggcgcaactggtgttaaacgaacgactggacaacatccggctggaattttgattgttcctgattatatggatgtatatgattttagtcctattcaatatcccgctgatgatcagacggctgcttgggaaacgactcattttgattttcattctatccatgataatattctgaaaatggatattctgggacatgatgatccaacaatgattcgtaagctacaagatttatcaggaattgatccagagaccattccaactgatgaccccggggtgatgaaaattttctctggcccagaagttttaggcgttgatgaaaatcaaattcaatctaaaacaggaactttaggaatccctgagtttggtacgcgatttgtgcgaggaatgttggaagaaacccatccaactagttattcagagcttctccaaatttctggattatcacatggtactgatgtttggttagggaatgccgaagaattgatcaaggcgggtaccgtaactttgaaagaagttattggttgtcgtgataatattatgatggatttaattcattatggtttagattcacagtcctccttccaaattatggagagtgtgcgtaagggaaagggaattccagaaggctatgaagataagatgcgtgcggctaatgttcccgattggtacattgaatcttgtggaaagattaaatatatgttcccacgggcgcatgcttcagcctatgttttaatggccttacgaattgcctactttaaggtttattatccattggtttattacgcagcatatttcacggtacgagcagatgactttgacattgtttcgatggcacgcgggaaagaatccctcaaaaatcgcatgcaagaaattaatgataaaggtaacgatgcgtcgacaaaggaaaaaaatctcctaaccgtgttagaattagctaacgaaatgttagaacgtggttttgaattcaaaatgattgatattgaaaaatcagatgctgaagaatggttaattgaagacaagtccttaattgcaccatttaatgctttaccaggtttaggattgaacgttgctaaacaaatcgtggctgcgcgagcagacaagccattcctttccaaagaagacttgtcaaagcggggacatgtttcgcaaactttaattgatttcatgactgagaacaacgttttatcggagttgccggatgaaaatcagcttagtttattctgatgatttgcaaaaatgcccatataatggtatattcagagtagtaatttgatactcgttaattgagtgagcagcgatgctcgctctttttattggcaaaatataattctggaggttcaagtttgagtaacaatgttattgaaaaggtgacagaattagtccaaccaattactgatcgccataattttgaacttgttgaagttgaatttgtaaaagaaggtcaaggttggttcctaagagtctatattgacaaagttggtggcattaacatcgaagaatgtgccatggtcagtgatgagctaagtgaaattttggacgcgcaagatccagatccaattccacaagcttatttcttagaagtgtcttctccaggggctgaacgacctttaaaaacgaaggaagatcttacgagatcaattggtgaatatatccatatctcactatatgcatcgattaataagcaaaaagttttcgaaggttaccttaaaagctttgaaaatgatgaaattgttttggactatttagataagactagacataaagaacttaaagtaacgtatgatcaggttgcatttgctagattagcaatcaagatttagaggagagtttaaaatgagtaaagaaatgattaccgctcttgatatcttagaaaaagaaaagggaatcaaaaaagaagttatcgttgaagcacttgaagctgcattagtttcggcattcaagcgtaattacggacaggctcaaaacgttgaagtagaatttaatgatcgtaaaggtgatattcatgtttacgccgttaaaaaagttgttgaagaagttgaagatgatcaattggaagttagtttagctgacgccttgatgatcaatcgagcatacgaattagatgatgaaatcagatttgaagttactcctaaaaactttggccgaattgcagctcaaactgctaaacaagttattatgcaacgggttcgcgaagctgaacgtggtgtaatttacgaaaagtatggtcaatacgaagatgaaattgttacaggcgaagtatcacaccgtgataatcgttacgtatatgttgacttgggtggggtcgaagctgtgatggctaagtcagaccaaatcccaggtgaacaatatgaacctcatgatcatattaaagtttatattacgaaggtggaaaataacggtaagggacctcaaatttttgcttcaagaacggattcgggacttttgaaacggctctttgaacaagaagttcctgaagtttatgatggaacggtcgagattatgtcgattgctcgtgaagctggtgatcgtgctaaaattgcggtacgttctaatgatcctgatattgatgcagttgggacatgtgtgggtgctaagggccaacgtgttcaaacgattgtcaatgaacttcatggtgaaaacatggatatcattgaatggaaagaggacccagcagaatatatagctaatgctttgaaaccttctgaagttattgacgtattatttaatgaagaagatgaaaattactgcatggtaatcgttccagattaccaactttcattagcaattggtcgtcgtggacaaaatgcgcgtttagctgctaaacttgttaacttcaagattgacatcaaatcggaaacagatgcatcagaatatgctgaagaagaagattctgaagaaagtacagaagaaaccgctgaataaatcattggaggtgtgttcttgatgaaaaccagaaaaataccaatgcgtaaagacattgtgacaaatcaaatgtttcctaaaaaggaactcgtgcgagttgtcaaaaataaggaaaacgaagtagctattgatccgacgggtaaagctgcaggtcgaggcgcttatattggattagatgtcgaaattgctaaaaaggcaaaaaagaagcgaacttttgatcaagcgtttaaaattaaagttgacgaccagttctacgatgacttaattgcttatgttgatcatcagcaagcacgaaaagagttatttggtaagtaaatgattaaagaaaatattagtaaatatctcggattgatgcgccgttcaggtaacttggttactggtcaagaactagtactcagttcaattcgtagtcagaaagccaaattcgttctggtaacagaagatattggcgagtcctcaaagaaaaaaattattgataagtgtcatttttacgaagttccattcactattttgggaactaaagaagatctttccaaagcaattgggcaggaaagatcggtagtggcgactgaaaataatggttttgcaaaggggttactaaagaaaataaatgaataggagcgtgaaacgatgggcaaaaaaagaatttatgaattagccaaagaaatcaacgtttcgagtaaagatattattgaaaaggcgcaggccgatggtcttgatgtaaaaaaccatatgtcgacgctagacgatgcttctgaaaagcatttacgcaatgctttcaaaaaaaatactactacaaacaaaccggaagaaaaacggacacctaaattccgttcaagcaaaactggtaaaactgtggttaagaaaagcgaccatccagcagctgatggaacgaagggtattcaaagattgaaatcatcaaataatgaaagtactacaagaaacaataacaataacaaaaatggcaaccaaaaccgtaataatacaaatggtcgtccaaacaataaccaaaatcgtccaaacaacaatcgtaatcaaaataacaaccgtaatggtaatcgtcctaaccaacctaagcgcgatgaaaaacaagatcgaattcgtgcttcagtagcagaggctgcccgtatggctgctcaagctaaccgcgaaattgctaacgagaagccccaagctaatcgtcaacgcacgaatagcgctaagccaggtgaacaacgtcgggaaggtcgtaataaccaaaatcgtccaaacaacaataatcgtaacggtaacaatgtaaatcgtacgaataataataatcgccctaacaataacaatcgtaacaatgaaaatcgtccaagtcgtccaaataatactaatcagacgactaataatcgcccagctaacaatacaactagaccagctgctccagcagctacgacagctaataatagtggcgaaaagaagcaagatcgtttcagtggacgtaacaacaattctaggggtgggaaccgttttggaaacaaccaaaatcgtccctttaataaagaaaaccgtaagaacaaaaagagaaatagaaaagctaaacgcgatgggcggatgaaggaaacaactaacaaagttgttactgttcgtaaggaacgtccattgccagatgtattagaatacagcgaaggcatcaatgtagcagagattgctaagaagattcatcgtgaaccagcagaaattatcaagaaattgttcatgatgggtgtaatggttaaccaaaatcaatcacttgataatgatacagtggaacttctagcagccgattatggaatcgaagctcaacaaaaagttgaagttgatatttcagatattgataagatttttgaagacgaagaaaagaatacaactaaccttgtatcacgccctccagttgttactatcatgggacacgttgaccatggtaagacaaccttacttgataaacttcgtcatagtcatatcactgaaggagaagctggtggtattactcaaggaatcggtgcttaccaacttaagcatgatgataagttgattactttccttgatactcctggtcatgcggcctttactgaaatgcgtgctcgtggtgctgatgttacggatattacaatcttagttgtcgctgctgatgacggtgtaatgccacaaactattgaagctatcaaccatgctaaggctgctaatgttccaattatcgtcgccgttaacaagattgataagcaaggagcaaatcctaaccatgttatggaacaattgactgaatatggtcttattcctgaatcatggggtggagacacgattttcgttgaaatttcagctaaattaggtcaaaatatcgatgaattacttgatatgattttacttcaagcagaagttctagaacttaaagctaacccagatcaaaatgctgctggatcagtaattgaagctcaattggatcctggtaaaggttctattgcaacaatcttagttcaacaaggtacaatgcacgttggtgatccaattgttattggtaacacctttggacggattcgaacaatggttaacgaacatggccgtcgagtgaaagaagctactccatcaaccccagtagaaattactggtttgaacggtgttccagaagccggtgatcgtttcgtagtctttgatgacgaaaaatcagctcgtgcagctggtgaagaacgtgctaaacgtgctcaaatggaagaacgtaaacgtagcaaccatgttactttggataatctctttgattcccttaaagaaggcgaaatgaagaaggttgacatcattatcaaggctgatgttcaaggctctgtagaagctttagctgatagtttacaaaagattgaagttgaaggtgttcgagttaatatcattcataaggccgttggagctattaacgaaagtgacgttacccttgcagctgcaagtaatgcgattatcattggtttcaatgttcgcccaacagctcaagctaaacaaatggctgactctgaagatgttgatattcgtctccatcgtgttatctataacgcaatcgatgaagttgaatcagcaatgaagggaatgcttgaaccagtttacgaagaagaaattattggtcaagttgacattcgcgaaacttacaaggtttctcgtgtgggtacaattgctggtggttttgtaactgaaggatttattacacgtgattccggagttcgtttgattcgtgatggtgtagttatctatgaaggtaaactaggtagtcttaaacgtttcaaggatgatgttaaagaagttaaacgaggatttgaacttggtttaacggttgaaaattacaatgatatcaaaattggtgatgttatcgaagcataccgcatgaaagaagtaccagttgagtagataggaggaatctattatggctcgacaataccgttcggatcgcttgtctcaagaaattgaaaaagaagtgagtgatatccttcgtcgtcgtgtgcgtgatcctcgcgttgagggagttacaatcactggcgttgatgtgacaggtgatttacaacaagcaaaaatttattacagtattttatctgataaagcatcagatgatcaaaaaaccaaggcgggtcttgaaaaggcatctggtttaattcgtaaagagttaggtagccgcctatcaatttacaagacaccggaacttagtttcatcagagatgaatctgttcaatatggtgataaaattgatcaattactcaataaattaaatcgtgattaatccaaaagagtatgcttaatggcatgctcttttttgtttggacctaaataaataggacgaaatctttttaatacgatataagtaatgtaaaatggctatgaagagtgcattttaagtacagaatgagaggttaccaaaatggatggaataattccaattaataaagaacgaggaatgacaagtcacgatgttgttgccaaggttcgaggtattttaagaactaaaaaagttggacatagtggaacccttgatcctagtgttgacggagttttaccaatttgtgttggcagagctacgaaagttgtggactatttaatgggatttggaaaagtttatcaaggttcaattacgttaggtttctcgactactacggaagatctagatggtgaagtagttgaaaccaaaaaacttgatgaaccattaacggacgaacaaattaatcaaactttgactgcaatgacaggaactgtagttcaaattccacccatgtattccgcagtaaaggttaagggtcgcaagttatatgaatatgcccgcgctggtgagacggtagaacgtcctcagcgtcaaattaaggtttatgattttgttcaaactcgcccatcaatttttgatgcagaaaaggggcaacaaactatttatttcaaggttagttgtggcaaggggacgtatgtgagaactttagcagttgattttggtcgtcattttggattaccagcggtgatgtctgatttaactcgcttggctagtgggggattcaaaattgaggaatgcctgacgttatccgacttagaacaagcacgagatgaagatcgtttatcgacgattattcagcctttagatcaagccttggataactttaatacaattacaatttcagatgttgaatgggaaattgttaaaaatggaggatttttgaatcgtccgcaaactgatgaaatcatagctttaaaatataatgggaatattcaggcgttatatcagtatgatacaaatcgtcaaaactatattcctaaaaaaatgttgttggtgagatagaaaatgcaaatagtaagaatacatcatccatattcaaaaaaaataattccagcagaacctgtagcactagctttaggtttctttgacggtgttcatcgtggacaccaagcagttattaagcaagcttgccaaaaggcccgagaacagcatttaaaggtggcagcaatgacgtttaaccatcatgcgtcggtagtatttgaacaggatcgtaactttagcccgttaagctacctaacttctgtagaacgcaaagcggaattaatgcgcgaattaggcgttgatatactttatgttgttgatttcacttctgcatttggtagtttaaatcccgaagattttgttcaacaatatatggtagacttaaatgccaaagtggtagttgcaggttttgattatacgtttggacctgctgagctagcgaacatggatactttaccagcgctagctcagggacgatttgaggttattaaagtacctaaaatcattttaaagaatgataagattggatctggtaagattcgtgagatggtatcgttaggaaatattgatcatgctaatgcctatctaggttatgcttttcaaacgagtggcgtggtggttcatggagaagcacgtggaagagaactcggttttccaactgctaatatagtttctaatgaaaatcaaattacacctgggatcggaatctatgtcgttgaaatcaaagtaggcgaccgatggtataagggaatggcatccgttggcaaaaatgtagtctttggggaaggtcgtcctgttactactgaaattaatattttagattttaaagaagctatctacggagagactgttaaagttaaatggtaccatcgcttacgaggcgaaattaaatttgatttggttaatgctttaatcgcacaactgcatcaggatgaagctgatacaagggaattttttaacaagttataaagatgtctgaccaaatttgactatggttgacatttctacaaacctctggtatcttattaagtgttcttagcactccaactttctaagtgctaaaagaggtgattttcatgttaacagatcgtgagttgttaattttagaggagattgtccgagagtatactgagaatggtcagccaatcggatcaaaaacgttgatgaataatcttccagtaaaagtgagttcggcaacgattagaaatgatatggctaagctagaagagatgggtctgattgaaaagatgcattcatcttctggaagaattccatctttgatgggatatcggtattacgtagatcatttgttaagccccaagaagttaaatcaaagtgaggctcaacagattcaaaaggggctggggatgcattttagagaagtagatgacattgttcgaacttcggctgaaatgttatcaaatttaacgcattatacagcgttaacgttaaaacctgaccaaaaagatgcgactttagatggttttcgaatggttccactcggtggaaatcaagtaatgttgattttggtttctagtaatggcgacgttactagtcagcaattttcgatcccccgaggaatgaatagtgagactgtcgaacgcgtcttgagaattatgaatgatcgcttgattgacgaaacgcttgatcaagtttattatcacctgaaaacagatattcctaaaattgttgagcattatctgcatagtaacgacggaattattgatattttcgaaaatgtagttgcgcagtcttcacaggaccgttacttcattggagggaagttgaatatccttaatttctccaagaatgtagatgttagttcaattagagggcttttgactctatttaatgagaatgatcaacttgatggattacttggaaataatcagagtgacttagatgtaaagattggcgatgaattaagcaatgctttactaaaggattttagcttaatcactgctacttatgatgttggtagtcgaggcaagggattaattgccattctcggtccaactagtatgcagtattcgaaaacattaggcttacttgatacatttagagatcagttgtctaatcgaatgctcgaatattataagcaccttgatgatagttaggaggattgaattggcaaaagagaaaaaagaagaagttaaagaagaagaagtttctgaagctacttcaacagaagggtcagcagatgttgaatcaactaataatgatgattcaactacagaaactcaagcaacaacggctttagatgacattaaaaaggtggaagccgaacgcgatgaaatttcagacaagtatattcgtgctcaagctgaaattgttaatatgcgtcgccgaaacgaaaaagaacaggcatcattaattaagtacgatggtcaaaaacttgcaaaagcaattttgccagcacttgataatcttgaacgcgctctagcagttgagtctgcttcggaacaactcctaaaaggggtcaagatggttcaaaccgatttgttaaaggctttgaaggaaaatcacgttgctgaaattgaagctgaaggacaagcttttgaccctaatatgcatcaagccgttcagacggtgccagctgatgatgatcatccagccgatacagttgttcaagtattacaaaaaggatatattttaaaagatcgagtattacgtccagcaatggtaatcgtagctcaataaaaaaagaggaagagggattttaaacaatggcaagtaataaaattattggtattgatttaggtactacaaactctgcagttgctgtcatggacggtgacaaaccaaaaattatcacaaaccctgaaggagcacgtacaactccatcagttgttgcttttaagaatggtgaaactcaagttggggaagttgctaagcgtcaagcaatcactaaccctgatacaattgcttcaatcaaacgtcacatcggtgaagctggctataaagtaaccgttgatggcaagtcttatacaccacaagaagtttcagcaatgattttaagttatatcaagaaatttgctgaagattaccttggtgaagaagtagataaagctgttatcacagtacctgcttactttgatgattcacaacgtcaagctacaaaggacgctggtaagattgctggcttggatgttaaacgtattatcaacgaacctactgcatcttcattagcttacggactagatcaaaacggtaaggatgaaaagattctcgtttatgatttaggtggtggtacttttgatgtttccgttcttgaattaggggatggcgtattccaagttctttcaacaaacggtgatacacaccttggtggtgacgactttgatcaaaagattatcgactggttagttgatgaattcaagaaagacaatggcgtagacttatcacaagataagatggctcttcaacgtttgaaggacgccgctgaaaaagctaagaaggacctttcaggtgttagcgaagctcaaatcagtctaccatttatttcagctggcgaagccggaccattacatcttgaaaagactttgacacgtgcgcaatttgatcaattaactgctgacttagtggaacgtactaaggctccagttgaaaatgcgcttaaagatgctggactttcagcttctgaaattgacgaagttatcttaaatggtggttcaacacgtattcctgccgttcaagaagccgttaagaactggacaggtaaggaacctaaccactcaatcaaccctgatgaagccgtagctttaggtgctgctgttcaaggtggtgtgcttactggtgatgttaaggacgttgttttacttgacgttactccactctcacttggtattgaaacaatgggtggtgtattcactaagttaatcgatcgtaatacaacaatcccaacaagtaagtcacaagtattctcaacagctgctgataaccaaccagctgtagacatccatgtacttcaaggtgaacgtccaatggctgctgataacaagacacttggtcgtttccaacttactgatattccagctgctcctcgtggaattccacaaatcgaagttaagtttgatattgataagaatggtatcgtaaacgtttctgcaactgataagggtactggtaaggaacaaaagattacaatcaagagttcatcgggtctaagtgatgaagaaattgatcgcatgatgaaggaagctaaagaaaacgaagaagccgacaagaaacgtaaagaagaagttgatcttcgtaacgaagttgatcaattaatctttacaacggataagactttgaaagatcttgaaggtaaagtttctgaagatgaaatcaggaaggctaaagatgctaaagaagctcttgaaaaggctcaaaaggataacaatcttgacgaaatgaaagctaagaaagatgacttgagcaagattgttcaagatctatctgtaaagctttaccaacaagctcaagaagcccaaggccaagctgctgatggagctcaagccaacgctggtgacgctaagactgatgatgacaatacagtcaatggtgattttgaagaagttgatccggacaaggataacaaataaataaccagtaatcgtaaaaaggtcaaagtcagtgactttgacctttttgcatgattatctgttaagataagctaatagaaatcatggaggatgaatatggctgcaaataaagattattatgacattctaggcgttagtaaggatgcgtctgatgatgaaattaagaaggcctaccgtaagctttctaaaaagtatcatccagatatcaataaagcacctgatgccgaacagaagtttaaagacgtcaatgaggcgtatgaagtcttaggtgactctcaaaaacgtgctcaatatgatcaatttggttcagctgatccgaatgcaggctttggtggcggtggatttggcggccaaggtggctttagtgacttcggtggtggattcgaagatatctttggttcattctttggtggtggacaacgccaatcaccaaaccaaccacgccagggagaagatttgcaataccaaatgagccttaaatttgaggaagctatctttggtaagaagacgaccatcaagtactctcgtgaagccctatgtaaaacttgtggtggatctggtgctaaagaaggtacttctcctgtaacttgtcataagtgtaacggtacgggtacaattcaagtaacccaaaatacaccacttggacgaatggttcgccaacaaacttgtgatgtatgtaatggtacaggtaaggaaattaaagaaaaatgtcctacttgtggtggtacaggtcatacttctcaacaacacgaagttaaggtatcggttcctgctggggttgaagatggacaacaaatgcgtctccaaggtcaaggagaagctggatttaatggaggcccttatggggacttatacattattttccaagttcaaccaagcgatatgtatgaacgagatggttcagaaatttattacaaccaaacgatttcatttgttcaagcagctttgggtgacgaaattgaagtaccaaccgtacatggtaaggttaaattaaaggttccagctggtactcaaacgggaactaacttccgtttgaaaggcaagggagccccacgtttacgtggtaatggaactggggaccaacatgttaaagttaaggtcactgtacctaagaagcttaacagcggacaaaaggaagccttgaaacaatttgctaaagctagtggtgaagaaccttctggtcatggtaagagtggtttctttgataagtttatgaattagaaaaaaggcgcgcaagatttttattcttgcacgccttttttgagtctaaaaaacgctatacaaggtgagtatgtagattactcatccatctatagcgttttttttaatagttattatcattctttttttctggttgagcactaatcaaaccaaaaaatttaagacagtagatggcactaataccaactaaaacatatacaatcctagaaatgattgctgcttgacctccaaaaagtgtagctactaaatcaaattggaaaataccaactaataaccagtttaagccaccgacaatcaatagaacaagtgctataacatctagtgttttcatggttgaatcctcctttagtctcttattttcggaacaacttaattctagcaaagttaattgaatatacctaaaaatacacttacaagtaaattaataattttacaatcaaatgatgcaataacagaaggttagttaaggatggctgttcctaaggttaggtaagtagcaaataaaatccaaaggaaatacggaatcattaagtaggctgccaatttactactcttataaaattccttgatacaaaagaatactagtgcgtctaatacaagaatgattaatagtccggtccaacgactacttgcgttgaaaaatacaatactccaaataaaattcaagaaaagttgggcaataaataatgttaggtttgttttgcggtagttacttctaactgtgaaaattaggtagccaacgataccaatcattaagtataaaattggccacacgataccaaacaaacgatctggtggtgagaatggtggcaaagtaaagctattatagatggctttgatgtcaccagctaataatccagataatgagccgattagttctactccaactaccgcaataattaattgaatccatttacttttggtttgcataaaaatccctcccttatattttgtgaaacctatctcattaaggttagcttaccaaaagtgggggagagaatataatattttgcttaggtagtggatcaaagatttatacagctgtaaattgtcattaattataaatagcgtatagttaaaattatttgagaacaaattaggaaaactgtaattttgcaagtaaaatgcgatattttgtatattgttctaattaattttatgcccaataatagtattaaggaagcgctttctgatatgctttgcaaaaatatatttattgtaaagcattcttaaaagcagctgtagattatatatcaattattgaggagctgatccaaatgaatgagattactaacaaaaaaatggataaaaaagtcatgtcactagttttaattgccggaactgcttcatatttagatgcgagtttattagttagtttaggcgtagcactacctatatggactaaaattttagatttaactcctatcctgagcggattaatctcaacgttgttaacattaatggtagctttaggggcaattgtaggtgggtggttagcagataaatttggtagagtaaaagtttttaatctagatattttatttgtagcagttggggctattattatagctttcgcacctaatttgccaatcttattaattggaacggtggttgcaggtttagcctcgggagcagatttaccaacatcccttgcggtaatttcggaaagaacttctagtcaaatgtacggacgctcaattactataactcaaattttttggacgattggaattttgctctcacaatttattggttttttaacatcaggaatgacagttggatcagtaaggtggatttttagtgtaattgcttttgtagcattctgcaattggtgcatcagagcattttctaataaattcaagaatattgaatctagcctagaggaggaagtcaataaagaaaatcatatgattcaacataaaaaagttagcttaagagacattcttaaaaataagcaatatttaagtgttttgattgctttaacggcgttttatctattctggaacttaccagctaacacgtggggttcgtttgttaattactttttggttactgtttcacatcgaacacaagcatacgcaacgattgtagctttaattgctaatttatttaatttggcatcaaattcaatttatgtaagagtatcagatacaaaatatcgttatccagttatgtatggagcaattgttattggatgtatagcatttttctgtgctggcatttggagtagtgtatggtgggtgtttacaatcgcatatattttatattcttcaactaacactttatgcggtgaaccaatttacaagatatggacacaaactttttatcctgtcgatgtaagggcatctataactggattttcgtatggatttgtacgattttttacggtaatattttcattatttactccaactttgatggcttggtctgtacaaaaatttttatggataatttttgtatgcgctttattatcaggtggatgtgcaattatcatcgtacaaatggtatataaacaaaaaaataagtaattttaagaggtgtataaacatgaaaaagtattggatttggtacccaggagattttgagatccatcaaggaatgttacaaaactttacccgtgaagaacgtgggatggcttggcctgcgtattggtatgtagatgattgttataaaaatatcaaatttgagcgggtttataatctaacagaaagtactatatttaaggtgatcactcatcagaagggctatattactgtagatggtaataaatttcgggttaacgaagatattaaagtggatgttggtgaacatgaaattgtcgtatacgtatttagtagtaatcaattgccaacagtatatattgacggaagcgttatttattcggatggaaactggttagccaataattatgtgaataaacgtcaagtaggatataataaattatttaaaaaaattactgacgatcctaataaaattccatatgaacgagttacgttaaatccacaaacttttacagtgaaaaataatggtttgttagtggattttggtaaagagattaatgccgaacttagtttcagtaaactagcgcataaaataacggtttgttatggagagtctgaaactgaagctctagatacggtaaaatgttattacaaacaatcaaatattagtaaccaaactaagcttccaaaaagagcatttagatatttatttattccagaatttactgatagaaatattagtatcacagcaactaatgtatttttaccaatgaaaaatgtatcacagtttatatcagataataaattaatgaatgatatttggaatatctcgattagaacttttaagttatgcagtgatttattttatattgatggcattaaacgagatcgctggatttggggcggagatgcctatcaagataattttattaatcaatattcattttttgatgaagatattgataaaagaaccataatagctctacgcgggcatgatcaagttcagcaacatataaatactattgtagactattctttactatggattattagcatctataatcattatgagatgactgctgataaagaatttatccaaacaattatgccgcgtatggaaattatgatggacttcttgctaaaacaaactaatgaacttggatttatttatgggcgtgatggagattggatttttattgattggtctgaaatggataaagaagggactatagctgcagagcaaatgtttctattacagtcattaaaagcaatcattgcttgtaaaaatattttgggcgaagatgcagagagttatgttcaacaatttgaaaaattaaagcaaaatattctaaggtatttttggaatgaaaaaaaaggcgcttttattgatagttacgaatctggaaaaaataatattacaagacatgctaacatacttgcaatattatttgattttattggtaataaaaaaaagcaacaaattttatctaatgtacttttgaacaatgatgttacacaaattacaacaccgtattttaaattttttgagcaagacgcactatgtaagttaggtcaattacctcaagtttatcgtactattgaagaatattggggatctatgattagaaagggagcaacgactatttgggaagagtataatccaaatctaagtgatgaccaacagtatgcgatgtatggtgatccatttggaaaaagcctctgtcatgcttggggagcaagtcctatctatctattaggaagatatttctttgggttacgcccaacaaaaccaggatataaaacgtttgaaattaatccgcatttggaaaaatttaaagaattagaatgtactttaccaattaaggatggtgtagttaagttcaatttgaaagatgccaaactaactatttggacaaataaaacgggaggtactgttattaataacggtataaaaattagtctgaataaaaatgaagagttaaccatttaggcttctttttaagaattattaatatggttattgctaattagttggtgacgataatcgataggtgtgatatttatatattttttgaacaaacgatgtagtgaagaagggtttttataacctattttcattgaaatatcctctaatgataatttggtacggtatagtaaatcttgtgctgcatataaacgacgctgttcaatgatttctttgtatgtttgtcccgtagaggatttaattttattactcagatagttcatgttatacccaaaatgttcactagttaatttgaggttcgtactagaatagttgcgttcgatatattttagtatttctaatatgtttgaatcattactattaaagtcatttttgtagtattgaatagtatcttctaattgaattagtagggtggagaataaaagatcaattgtaattctatttttgtttacattatttgtcgccatttcgagagaaataatatttttaattaaactttgggcgattggtgaggaatttaagtcgcatataataaaattattgctattagtttttaaattagtctggcttaaaaataatgaaattttattttcgtatccttttagatagtctaacaaacgattaatagttacggaatctttaattaaaatgtttataaggatatcttcctgaccagtgtatccaattttttggacagtatttttatccattattaatagctgtccctgtgtaaaatcaaaatcttcattattaagtgattgggtgcaacgaccagaatacatgtaatttagttctataaaactgtgcgtatgtgctgggacatatgaaaagcgattagccttagttacattaatatcattttctttaaaaaaattccattttggtatcgtaggaataggactctcattaaaatctaaattcatataattataatttatttttgatgttttctgtatcttctcgacataattaaatgtatatagatatcgctcaagaattaaatcgttcatcataatactccttatttactgataaacctgtagttatgcattttttttagtggaactatgatattgtagcaccttttacaagcgcttacaattataaatataaataggaggaataattatgacaaataataaggcattaaaaaaatatcgtcctttggccactgcatctggtataggatcgattttaggttcgggtatcattgtaggcttatccgctacaattacggtatggcaacaaggtttaggtttaactaacatgcaagttggggtgatttctggagcattaacttttgcaattgccttgggttcattaattacaggtatgatctccaaaactttcggacttactaaggcatttaattggttgaacctattctatgctattggagcattgatttgtgtatttgctaatagttatttactgttacttgtaggtgttattattgctggatttgcttcaggggctgatctacctattagtttaacggttatatctagggatgtacctgatgaaaaaacgactgcaagtttggtatcgtttacgcaaattttttggcaaattggagtattcttctcgtatggatgtgcgtttgtagtttcaaagatgtcgggagctactggagctagaatcatttttacgattttatcgatttgtgctttattaacatttttatggagaagcttttcaaaaacatttagaaacttacatattgaagcggaacaacgaaatgatgataggaaacaaaatattaaaaataatcaaaaacaatccatgttttcgttcttaggtagtaacaaaaaatatttagcattcttttttagtatattgattttctacagctgttggaacttattggctaatacttttggtcaatttcaaacatttactttagtacaagcacatgcgagtcaaagttttgctacaggcgcagggttggtgctaaatattattgcattaatcgcgtctatggcattcgcatcggttgcaggtggtaaatatcgtaataaattcttttttgtaggtattgtggttcaatttgtagcaatgctaggtttagcacttagtagccatgcgttatggccaatcgttttagcaattggattttataatattggaaataatatagcaggggaagatatgtataaggtatggacccaggaatcgttcccaatggaaaatagagcatcaattcaaggctttatcaatggattctctcgattcctttgtggattatttgcctttattacaccagctcttgtagtaccagctcatattaggacttcgatgtttggttttgcaggtatcgttttactaagctttatagctgggttaataatgatcaatttacagaaaaaatataaagtaaataaagctttggaggacaaagaatgagtttcacatttcagattaatagtgatgttgaatttaatcataataaaaaattattagataaggctgaggataacgtaactgagttatatcatgaagttaagacacctcaacaaatcgttacagttgaaaaaaataagcagaaattagatggtatcggtgtaaaaaaaatcgctgatatcaatgaattagcaaaaatgtcactaggaagaaatgaaagagttatcttagattttggagatcattatgtaggaagattttcaattaaagctagatccatcggttcaccaatggatgcaccgttaactgtaaaattaaaatttgctgagttgcctgctgaactagaacagaagagtgaggattatgatggctggctaagtaaatcttggatgcaagaagaaattttacatcttgatcagttaccagcgataattaaattgcctaggagatatagctttaggtatgttgaacttagcgtaattgatacctctccaaaatggaaaacaatattttctgaaccaacattattaactgaaagttcagcaaataatcatttaaaggaatttaaagtgaaggatgcagaactaaaagaaatctataaagtgggattaaaaactcttgaagattgtatgcaagatgtctttgaagatggtcctaaaagagaccgtagactttggattggagatttacgcttacaagctttagcgaactatgcttctttcaaaaatacaactttggtaaaacgttgtttatatctttttgctgctatgacagcaaaggatggacgaattccagccaatgtttttgcaggccattcttatgctccagatgatacatttctattggattacagtctattctttactagtattctagatgattatgtaagagaaactgaagattataaccttctagatgaactatttccaattgcaaagaaacaaatggactatgtattagatagatttgtaaataaagacggttcaattaatcttaacgaagattatccagtatttattgattggtcaaatgattttagtaaggaaacatcagggatcgctgtaatagtatacactttaaaacaatttaatcatttattaaaactacagaaggttgaaagaagcgatcaggtaaaatatattaataacatagaaaaaattattgattatataaagaatcatttgtttgataaagagcgggggttgttcttatctggaacaaaccatgaagttaacattgcaagtcaagtttggatggtattggcgggagtctttgataaaaaaacaaataaaaagattatgcaaaaaatggttacagagcttttcccaattaaaggtattgctacaccatatatgtaccatcatattactgaagcattatttcaagtcggattggaagaggaagcagttaagcttttaaaatcatattggggtggtatgattcgactgggtgccgatacctactgggaagcttttgagcctgaaaatcctagttattcaccttatggtagttctatggtaaatagttattgccatgcatggagttgcacgccagtatatttaattaaaaaatatctttaatttaaaaatcttgttttttatgaaagttaatttaattcataaaaacaagatttttttctagcaaaactaaggatgacattttctcaactaaaagctaatattaaatgtgtcggtattaaatttcatctgataccaacacacacggtggttcgaaatatcctcccgcctcaaactaaaactaggagagttacatatgcataagattaatcgaaatatttccgctacggccatcatagcggctctttacgtggccattacccttgcactagcacctatcagttttggcgtagtccaactacgactttcagaaatgttcaaccatttggcagcgtttaataagcgttatatttttgcagttacgttaggagtcttgattgtgaatgtatttagtccattagggcccattgatatgctttttggtacggctggaaccctaattggaacaacgctaacgtacttttgcacacgcaaagttacgtcattggttggtaaatttaccattgcgacaatttgccagttaccggggatgttactggtggacttagaaatgcacttatatagcaatcttcccatgtttccgacttattggatattggctgcgggtgaacttgcctcaatggtaataggcgcgtttttaatctacttaatttctactaaagttgacttatataaataaaaaagaggttgaataaatgacttttgaaaaaatactacctattttaaaaaataatggtaaagcaattcgtgaacagtgggatggcgatgaagaatttatcttagtagtcaaagatcaaaaatttaataatattcccgtaactccttatatgttaattaaaacgactagcgaaggctattctagctttgcacctaccgtttgtgacgtgttggcagacgattggaaggtcgtggattaattggttaattatcctgagttaaagaataagtatgttttacttacaggagctaattctggcattgggcttgctcaagctcgcgaatttttgggtcaaggtgcaaaagtaatcggactcgattgcaatgtagatcaaatgcaacaactaaaagcaatatatacgaccaattttggttattaccaagtggatttgactgatgaaaaacagttagatacggtaattggtaagataagtaaagtagacattttattaaatacggctggggtacttgacgattatcagccaattgaaactacttcgatcaatttatggcagaaaattctggctacaaatgttacaacaatgtttaatgtaactaaaaagattttaccgcggttagctgaaggttgcgttattgttaatatggcttcaattgctggaatggttgctggcggtggtggtatagcttacacaacttcaaaacatgccgttattggttttactaaacaattagcactagatttggctgagcgaggaattcgagtgaatggcattgctccaggatgtattgatacaccgatgaatgcaaaagattttgcaaatggtggggagatggctaagtctgtcgctaaagaagtgcctataaaacgctgggctggagctgaagaagttgccagagttgctacatttttagctagtaatggggcaagttacttacagggaacaattattcctgttgatggtggctggatcacaaaataatttaaagcttttcaactttagttggaaagtttttttgttaaaaagtatatttttagtttacattttagcttttaaaacgttactaactatgagtacatctttttaatcataggaggtgccttaatggccagaccaacaaaagcaggcttagattattttccatttgacgttgattttaatgcaaatgaaaaaacggaagctattatgggagaatttggagctaaaggagttttaaccacgatttttatcttttcagcgatttataaaaggggatattttttggagtggacaccacttgttaaaaatagccttgcaaatcgaattgatggagttaatagtaaattggtagagcaggtagttaaccgcttggttgcttacgggacctttgatgaggaactgtccaactcggctaaggttttgacaagctcacgtattcagaccatgtatttagaggcgactaaaagaagaaaagcgccaagacccactctgtattggttagtcgatgagattgagaccgagattaatgttgacattaatccacaaagtaaaggaaataaaaataaattaaactaaagtaataaagaccttaatttaattaaaggcgactgtgtaaatgatccaattccaatggtaaaacttacttaaattactaatatgagatagaaaaatattgaacagctttaacaccgttagtaacaaaaagaaacttaaatgacaaacatccagcttttattgttataaaatgaaagttataaggcacaagaccttttacttgtttatattatttagctttgataacattagttttacttagttagggaaggaggcgtgaacagatgggacttatttggacattgattgtaggtgctattattggtgttattgccggggctcttacaagtaaagacatgcctgctggttggattggcaatattgttgctggtttggttggttcttggctaggacaaagcttattgggtacttggggaccttcattagctggtatggctttaataccatcaattattggtgctattattctagtagctatagtttcttggattctaaaagctacacataagtaattagctattttatataatattttgaggatgattctaaatagaatcgtcctttttatttggataaaaattatgaatgattaattgttagagcaaattaaaaagtaccttaaaatttatatttcttcctggacataaattttaaggtactagcttattaaaattttaattatttacccttgatcattgtgtaatttggggtcagcaggtttaatatgtgggatgctactcatagcttcaggattttcttgatatgtgaatttttctccatctcttgcgatttgtccctcaaaagcttttgaaccatcaccatctgaaaaattcatcagaacatgactaaattcactatgttcaatgtctttcgtatcaccaggcacgatgactccatacttctcttcaagttcttcttgtgccttcataaattgaagttggtgttgagtttcgcgggctaacaggaacttcaacatatcacgaataccttcatcttcagtcatagaatagagtcggctgacttgtaacctagcctctgattctctgacgacattaaatcgcatatcagcaactaaattaccacttgatgttacatagtctgcattccatgctgagccattgggattatttaggctagcatttaaaccatgaactagagcgtgttctgggtccatacctgccatagttactgctaatgatggatctctttttaaatcttcagcactaaatggtgcttcttcaagtaaatatccaatcattgttgaaatcatttcaacatgagctatctcttctgtaccagtatctaataataaatctttatatttttcatcaccagttgatgcccaaccttgcgaaagatatgacatcatccctgtagtttccccccattgtccaccaagcgcctcctgtaagcgtctggccatgattgggtctggatgatttggtttggcattgtattgcagttttcttgtatgtttaaacataaagacacctctttcttaagtgaaaaacgaagttacgttatataaaacaacatagtacaggaagaaatatatcatgattgtttatttaaacataataatatgttttgaaacatatattcataatgttagcgggattaaacgattattattgagggacagtattaagctaagatttaaaatgtttagaaaatacggtgaaggatttaattagaaatactatttttgggtataagtaagactttataaattttacaatatattcagatatcggttttttaaattagatttttatagagatagatttttaattccaccaacggaatcgaaccgttgcaaatcgccagagtggaaaagtattactttatattggactactcgtaacagtcattagcattcacttcaactatttttactactcatatttaaaggatttagttgatttagtcagagattaaaaaacaacgtatcaattacgttgttttaaatgattattattgtcttagattacacgaggacattcgtaaaaatcggagtttggtgaatcaaagtcaggactatatgtaccatcggattcttttaaaagtttatagtttgatgatacttttaaattaccgggcgttatttctgaaactaatattaatccgtttgaatattcatgcctagcgtataaacgatttttagatctatcgataatatctactcgaggcaactcgttcgagtatttatcttcatttttgatgcacctcctcaaatagatattatacaagaaaagataaaaatgtttagtaaaaaaggttattaccaagaaatttatttaattggaactaaagtagtaataaaaataccgactaattttttatttctgtaacatagctcaatatatccaagtttttcaagcgaaactaaagcttcaacaaatgtttgattatctaaattagagcgttggcgaattttagaaggatctacaatagtaggtcgtctcgtattagaattctcgattatagtatgcagtaaaatattatagtaattgattgtgaacaccttctttaactagagtatacatgaaataagtaaaaatgtaatagatgacgtattgtacttaggtcaacaatgaagaggcttacaaaaatgaagaggactgtaaagggaatacgcaacgagagaacaatcctgattggttatttaacaaaaaacaaactaagatacacaaatacttacgtaatgattgttttaggagaaactaatgataattaaatattaataaatattacgaagatagtaaattatatgtcgagtcttggttacaaataaattcttttagaagaacatattgtttttctagaagaaaaataaaaatatcctcgaattaacttcgagagtaccgcgtaatttaaagttgtcacttcgatcatttattttcaggtttcggagtgggtggcaatcgatcgcactttcgaatatatacgaactctggaaacaaaacctccacgaggcccaacttcgtggcaagttctagcaggcttattatcagttcttggtttgatattttctgagaacaggatagtcaatttaaaattgtgaaaatgtataatgaaggcaacagatagtagagtaagtttataaaagttttaaaacgaaaaaataatttaaaaccgtcctgaacacgacgctagaccgctcttttttatgctcaaaacatcaagtaaaagaacaaccttagaatgtaaacgaaagcagtatagaaataaggtatgtttgtatggtagctgattcaaaagcacttaaactacaggtgtaggaaaaataatcgattacaaaataaaagcctatctagtcaaattaatgattagataggcttttttgttttatatttattttctgcgaaaacatctaaaaaatgagttatgcaggaaattcgcagaaaaattaacatttatggtattttttcaaactcaacaatccctatttaccgccctttccctcagtatcagtcttcaaaacggtcatgaaggcttcttgaggaacttcaactttaccaacggatttcattcgtttcttaccacgcttttgtttatccagcaatttagcacgacggtcaggatcaccggtgtgaatcttggaagtaacatctttacgataagctcgaatgttggtacgagcaatgattttatttccaattgcagcttggactggaatttcaaagtttcgacgagggatgatttctttcagactagcggtaatttcgttaccacgttgttgcgcgaagtcacgatgagagatgaaactcaaagcatccacccgttcgccattcaataagatatcaatcttaaccaggtcgctaactttatattcaccgagttcataatcgagcgaagcataaccacgagtgctagacttcaacttatcaaagaaatcaaagataatttctgaaaggggaagggcatacttaacattcactcggttttcatcgatgtaatccattgtatcgaaaattccccggcggaattgcgataattccattacagcaccgacatattcattagggaccataatactagcatttacgtaaggctctttaatatttttaatgctagaagcatcaggcatttcagaaggattttcaacaatcttttcagacccatccgtcatttcgacgcggtaggtaactgatggtgccgtcgtgattaagtcgaggttgaattctcgttctaatcgttcttgaaccacgtccatgtgaagtagacctaagaatccgcaacggaaaccaaaacctaaggcttgcgaagattcaggttcaaattccaaggcggcatcatttagttgtagtttttcaagtgcttcacgtaagtcattatatttagcattatcggtaggatatagaccagaataaaccattggactcatttcacgataaccttctaaaggctgtgccgcaggattcttgaccaatgtaactgtatcaccaacacgagtatctttgatgtccttaatgctggccgttaagtaaccgacatccccagccattaaaaagtcacgcttcaaaggatctggagagttaacgcctacttcgttaacctcgtaaactgaaccgctgttcatcaacttaatcttatcgccaggtttaaccatcccttcaaataaacgaacactcaaaacaactccacgataatcatcgtattttgagtcgaaaattaatgcctgtaagggagcatctaggtcaccatctggagccgggattttttcaacgatttgttctagtaattcgggaattccgatgccttgtttggcactagccatcacggcgtcgctggcgtctaagccaactacattttcgatttcatttttaacccgttcaggatctgcagcaggcaagtcaattttattaataactggtacaatttccaaatcatcatcgatagcaagataaacgttagccaaagtttgtgcttccactccttgagctgcatcgaccactaagacggcgccttcacaggcggccaagctacgagacacttcataggagaagtccacatgtcctggggtatcgattaaatggaaaatatatttttcaccatcatttgctgtatagtgtaattcaacagcatttaatttgatagtaattccacgttcacgttcaagatccatggtatccagtaattgattttgcatatcgcgtttagcaaccgtttctgttagttcaagaattcggtcggctaacgtggattttccatgatctatatgggccacaattgagaagtttcgaatgtgggcttgacgatcttgtaaatctttatattcgttcataataatttccttttcataagtagtcactgtattaaattatatcagaccaaaccttaaaggttaaactaagctaaaaaatattgtaaaaatatatcaattcatttttttgttaaccgaactataaaatatagtaccggttgaggtttctcggattataaatatgctaaaatagtaatatgaatttttcagaaatttaatttttaagttacagcgggggagtaaggtcatgcctgaaaaaaatcagccggcagttgctacgcagtcaagttctgcaccagtaactagtagttctaaaccagcaactaataattcttcaacatcaactaaaccgaataatagtggagccaccaattctaatacaagcacctcggcgagtcaccaagctagttcatcagtgtcaactaacagcaaccatgataaagcgagttcgcaaactaatagcgagtctagtgccaaatctgatagtacacctaaggccagttcacgagtaagtagtaagcaaagtacttattattactacgttaaacctaatagagcaactaattcttatgataattataatagcgatgatagtgatgacacggacgaagaagattcttcatcgagcagcagtaagagcagttcggaagaaaaagttcataaagctaaaaaaagtcggattattactacaattaaatctgattcaaatagtggttcagatattgaatatcgaaatagccatggtggaatgatgactttcttagtagttttgattctactagttggcggctattttatttggaaaaaacgacgtcaaaaacgtccaactagcattggtagacatcaaaaaaagtaaaataaaacctcaaaatttataaattttgaggttttttatttatccaaaaaagacaattaatacccaaccgactaggcctaaaagtaccaaaccgaccaaatttaaaattgaaaaacgtaacatgaaaggctctgagtgacgaatacggaattgtttgtaggctaacaaattagctagtgaagccactagagttcctaatccaccaatattaacgcccaaaaagagaggataaacgtcattagtgaacttggaaaggagaatggtggcaggtacgttactaataatttgactactaaaaattgaactaagatagattgaagcactggattgtagtaattgatgcagggtctgtgtaagaatcggatagcggcttagattacccgctgccataaaaaagaacaggaaggtgattaataagccataatctactttatcgaacacgttatgattaattaacagtcctaaaccaattgcactaatgagcataacctcaagaggcaagatggagaagactcctaacaagacgatcacggtaaccaacccagcaatgatggtttgtttaagattaattgcaggaacgttaatagtcacaccctgaagtggggttttagggactaaaagcaagcaactagctaaaaataaaagactggttaaactgattgctagagccattgtcaacatctggataatgctcaaatgatagtagtttagaataaagagattttgcggattacccataggagtcaacatacttcctaaattagctgccatggtaattaaaatagtagggataaccaattttaggtgtgctttttcgctgataataaataaaagtggtagtaaggtaataatcgcgacatcgttggttaacaacatggcactgaaaaaagatagtaaaaccaacatccctacaatttggcgagtgttggtggctttttgaattaatacactagcggcaaaacttaataaatggagttcttcatagcatttaaccaccaccattaaagcaaatagagcaaaaatggttttccaattaatatcacctaactgtaaagggcttagcagacaactaactaaaaatacgcccaaggcaatccacatgattttgtcatgcacaagtttatttataataatgtccaactccagttcatcgaggtaatgtaattttaatcaaatttaatttaaaaacataaaaagcgcctcagaagagacgctcctaaacgattgattaaagttcttcattgtgttggtaatataatggtgataagtcggttgacttagtaattaagttggcacttaaggcttgaaaagcctgaattgctgtagcgctaatttcgtttccagcttgatttaataattcttttagggcagttgtatcggataattctaaagctcgttgttcaaaatcatgcagttgattccgcatttgaacgttaacttttgaacgagttgtatttaattcttttacgaactccttataatgcgcatcggttaagacactagccagtttgaaaacccaataggcagagtcagcagtgtaaactttagctccatgatgatacatttcaggtgtttccgacatccctgcaaaaaacggcacatatacactttgagccgcaacccccatggctaaccaatggattccaccaacttcaataggttgattaggcttaatttgcaagatgtgagactcttgagtagctggaagactaataggacgaaaacgatgtttttcagcttctgagcctgttccaactgggttatatggcgttccttcataatgagaacttaaaatttgttggacatcttcaatttgaattaatcggctggccttacgaataaatggtaagtcatggctaactggactttgggtaatttctggattaagaatccgctgtccttcccaaacacgaggagtgttgtaatattcatcagaaagatcatttaaaccaaaaatgtttctgaaattaaaactggttgggttgggatttaaatgatgcattgcaacaaattgtttaagatcagccttaaacataaagttttctggatcttcaaaatcaacttcttggatagaaagttggttagaaactaccgcataactatcatctggaatccgttgtgcaacccactggtgtccacctgcagtctccatataccaaacttcattagcgtcggagaaaagaattccattagtctcgttggtaccatatttttcaataatagcgccgaggtatttcacaccttcccgagcagatttgatatagggcaaagtaactgtaaccattgcctcttcaccaattccattttcaactaagggatcataaccgaggactcgattattagtgtaggcactctcggtggcactcattgctaccccatattcattgataccatcttcttcaaataagccgaattcagtggtccattccggagtggcggtatattttcctcgcactgggggaaggggcatcgtaaattggttatcattagatttaaattcagtattagctgcttcatcatgaggatgaacggtaaaatgcttgggccaagctgatttagcatcttcatttctcgcaatgatggttgatccatcagccgtagctgctttaccagctaaaaaacttgtacatgcagaatatttattgtcgataataaggaccttcttccgtaaattacttaatcatagtttatcacacagaaaagtactttgaattatttctgtttcatgagaatatatatatgggtttaaatggataatttaaggaggaaataaagatgccattaattcatattgatttaatcgaaggtcggaatgaagaccaacttcgtggactagtcaaagacgttaccgcagccgtcgttaaaaacacgggggctccagcagaacacgtgcatgttgtgctaaatgaaatgtcaaaaaatcattattcagttgccggaactttaaagagcgacgaaaaataataaaaaaacttcaaaatcaactgaaagatcagtgattttgaagttttttattcggctaaaccgagatattcattgagatactttgcaacaccatcttcggtattatcaaattcagtaatatcattagcaattcccttaatttggtccgtagcatttttcattgccactccacggccaacataatctagcatttcagcatcgttatgttcatctccaaaggcaattgtatcctgtcgatcaatatgatagtaatctgctaggtaggccaccgccttggctttctgaatacctttagaaacgatttccagaacactttggggtccgccccaaacgccgacagtaatatattcaccataatagtgtagtaattgatttttaactttttgagcactattaggttccactaaaatcgtaatcgaagttggattagttcttagcgttttttcggttaaaatttggtcattggaaatttcatgaggaaaaaattcaaatgaagcgggagccgcatgatccgcaaaaaatgaatctttactttcaaccgcaagtaattgaataccgtagtcatctttatgcttcatcaggtcgtagacgaccgctttgttgatggttctggaatattcaccatcccatttttggtgaggaatatgtgttaaagccccattaaaattcgccatcggcgttttaaggctaagttcatcgtaaatatcgcgagccatgcgataaggtcgtcccgtaacaatggaaacgatgtgtccagctgccgtggcatttttgatagttttaatggtttgaggtgagagttgactacttgaatttaaggtggtgccatctaaatcaagagtgattaatttttgatgcatttgatcgctccttttactattttctgtattacttataagttaacatggttaaatttaaaaaactagagtactttaggaagttaaatgaattgttaaggtggctcaacccgttttttttctgtataattaagtccagttttatggcgaatgaataaagaatagaaggaatatttaaaaatgcaactaccagttgattttaagaaaaaatatgaaaaattacttggggatcaagccgaagcttttttagcgagcttcgataatcctgttcaaaagggatttcggattaatccgcttaaatatcacggacatcttcatgaacatgcaatgcaacaatctgtgggttattcagcttggggctattttggtaaagtacgtgggaaaaccatcgatcatcaaagtggactagtttacagccaggaaccaagtgccatgctggtcggtgaattagcccatcctaaaccaggtcaaaaagtgttagatttgtgcgccgcaccaggtggaaagactacttatttagctagtttcatggatcaacaagggttattagtttctaatgaaatcaatcgaggccgagctaaaatcttggctgagaacgttgaacgctttggtattcagaatgcggtgattttaaatgagtcacctgatcgaatggaagatcgttttgccaattatttcgatgtgattgtggtggatgcgccttgttctggggaaggaatgtttagaaaagatcctgcagccatggaatattggaataaagattacccatctgagtgcgctaatcgccaaagagaaattttaaagagcgcgatgaagatgttggcccctaagggaactttagtttattcgacgtgtacctttgctcctgaagaagatgaacaaattatcgcttggttattagataactacgaaaatctagcattggtggatgtccctaaacaagatgacatggatgcagggcgtccggagtgggccgacggcaatccagaactaaccaaggcggtacgtttattccctcatcattttcagggtgaaggacattttatggcaaaactggtcaatcacgggatggagacgcccactgaaaagccccgagctaagaagaaaaagaaacaatcaagcaattcaaagtccctaaacaagacccaggtgaaattgtgggagacttttgctaaagcgtttttgaaagattcaaattatttcgatttagctcatttaatggttcaaaaagatcgcttatattatcaaagtgagcgtttagatttagaaggattaaggtatatcaagcctggattagagctgggagaatttaagaaaaatcgttttgaacccagccagagtcttttaatggccctccccgttgatgaattccaacgagttgttaaaattacagctgaggagtggcgtcaatatgtgcatggcgacgttctgtcgacaactactgctggtaaaggttgggtagccgtagctgtagatgatacagtggttggacctggtaagttagtacaaggtacggttaaaaacttctatcccaaaggcttacggatgaacttttgatttactaaagtgaataaaaattaattaaaaaaatgatctctagaattaggactggttaagctaattttagggctcttttttatttttagctttttaagataatactttgaaaaataaatctcacaataaaaacggggatgaatcataattcaatgctaggatggttaagtaaacggtatagttaggtgctgaatgagtagttgatcatttttttattaaaaagaggatatattacaaaaatgtttaattggttcaaactaaatggttacagcattagtgttgctcttttagttagttttattttaataataaaagtttatttagactgggggatcttgattattattggattaattctcactatcatagctcttcaaaggtttagataagagctagaaaaatcattaacactaatcgggtatatagttataatatactgatgttctatccgataaagtgaaaaaagtaaatttaaagtagtgaggctatacgatacctatggttgaggaattgaaaaagttatttaataatcgagggttggttctatttttattagaggcactcttggtactgattgtgatagtatcaataatactagaagcagtaaagatcaatgacattcatactgttaatgcaatgcgcagtgactttatcgcaaagcaaaaaaaggaagaacgtgcatttagtcgtgccgaaagaaatcttattaaaaaaactaaagaaactacacctaaggtcaatgatgagaaagttttaaacggacggttaagtccttatcttgaaaatactgatgcagaagtatctgtcgcgatctattcaaaaaagaataaccatatttatcaaacaactaatagtaaaagaaccacttatccttctgctagtattattaaagccgattttttagtagaacttttgcatcagaaacataaagctggtcagagtctagatgttaacgaacaagctgtgattcaaaagatgatggagcatagtgacaacgatgcggctactaatgtttataatcaaattggtggatatagtggcttagctaggtacttcagtaatgttggaatggatggatcggtagttttgaccactggatgggcgttgacggctacgacaccgcttgatcagattaaaacacttaatataattttttatcaaagcaattatattagtgatacttcaagaagttatattgaatatttgatgggtcatgtagctgaagaccaaaactgggggatatcagtcggttctaagcatttttgtttgaaaaatggttggaagcaaatgccaaacggtaaatggattattaatagtatgggacagattggaactggtcagaatagctgtacgattgcgataatgtctactggaaataaaacagaacaaagtggagaaaaattagttgaagatctcactaaggcggttagtagcgaactaaaaattaaataaaaaataaaagaaggacgtcctttagggatgtccttcttttatttttatatgtttaattggagatagattccaaacggattaaccttgtccatagataattactggttcatctacggttgttttttgatatagtttcaccatatccttaggtggaacgttgatacaaccgttagagccatgattgtaacgctgactaggattaccaaatacagaggcttgtacccatggagcggaatgaacaaatatcccgtcatcggttaaattgtctgcttgtggcacataagatttatatggttctccatttttttcataacctcgcatagttataggcgcaattttgaatttaatgaaataagcgcctgttggggtagcaatattaatcttgggagatccagtgttaatccgaattttttgcgccactgtttgattttgtactaaatatagtcgttcatgcgttaaatctatttcgatatgatcggaattagctatttttttatgccaatttttttgatttagcgtttgattagcctgattgaagtttttagctgaaacattattttttcctgccagtaaactttggataagatgttgtgcttcactatccgtatttaaactccaacctagagtgccctcagcgttactaaaagatacctgtttgccttggactgttgtaaaggttaaattttgtgctccagaaagcgtgtatttatggttaaaacgcttaatgaatttataggcgggctttaagtcgattgatggaccatctttactaatcgttccattttctattaaatcacttacttgaccagtaatttggtgtcctttagctcgaaacgtaaactgattttttaatagtaatctgatttttttagccgtggtttttccactccatgtttcagaaagtaatggggcagtaatttcaacatgtttattaggtgtatttaaaagtttatcactaactttttccacggtctgatttaccaatatctgattaccagagtgagcggacaataaagaaacttttccatcttggatcattacttttccattttgaggcatggtccgtgaagcattaattgcttctaaatgtttttgtaaagacggttgatctgtttttatagcagaaagcagggcgctttttttatataaagttaaagctttaaattgtttggtactatggttaatcgaccaccatagtcgattcctttgttcagttagtcgatacttcaattgcgtttcataatcggtaactggaatgttattaaactttttactagctaacaccttcttgttttggggatcgttaatagtataacttggcgtcacccgttggttctcaatttttttaacggcctcttgataattgaggtggctaatattgatattatcaatcgtggtatttgtccaaaaatgtgtcgattgataatagagttgttgaattattagaatacctaatattaagcaagctattcctagtacccatgctagccgatgttttttgttgatttgcattttactggcttctttctatttcacttttatttcataaatattacagcaatgctacatttttgtgaagcagttattacgaaatccttgataaatttttaaaattaattaatacgtaaatgctttagaaggacataaaactattatttaaatgcaagaattaaaataacgtttattaaatatttacaagtactatggcaatatgacttaagtttatcagcattaaatgttgcttttttgcgacaaatgtattaatctaactttattaacttacaaaaagtaagtaagtggagggattaatcatggtaaacgtagataaattagaatttggaattgaaacttttggtgatattgttgccaatgaagatggtagtttaaaatcagccgctgaatcgattcgacaaattgttcacgaaggcgaaattgctgataagtatggaatcgatgtgattggagttggtgaacatcatcgccctgattacagtgtgtctagtcctgaaactgtcttggctgcaatcgcatccgtaactcaaaagatcaaactagctacagccgtaacagtcttaagttcggatgatcctgttcgagtttatgaacgttttgccacactggatgacttatctaatggacgagcacaagtgatgcttggtcggggttcctttaccgaatcatttcctttatttggatatgatttaactgattatgatgatttgttcaatgaaaaactagaactatttgataaattacgtacagaaaaagccgtaacatggtcggaaaaattccgagcagctttaaaggagcaggaagtttatcctaagacagagagtggtaagctggaaacttatattggaattggtggctctcctgaatcgattattcgtgccgctcggtttggttataaagttataattgccattatcggcggccaagctgatcgattcaaaccgtatattgatttgtatcacaaagctaaccaaaaatttgggactccagatctaccaattgcggttcactctcacggatttattgcagatgacaatcatgaagccgttgaagtagcttttaaaaatattaaagcgaattttgatcgaatcggacttacccgtggttgggctcctatgagtcgtgaacaatttgatagtgaaactaaagttggttcattttatgtgggtgatcctgaaacggttgcgcaacgaattgctcggaccatagatttacttaatttaggtcgctttgacttagtgtatggtgctggtaatcagaccgctgcacaacgtgagcgtatgattgaactatatgccacaaaagtcacccctagagttaaagagattttaaaaagcaaaggggacgcagaataatgaccattaaacgagtcggaattttaggtgccggtaaagtggggattgttttggctgggttagccttaaaggccggctatgaagtacgaatttcagggtcaggttcagttgataaaattgatttaacaattagtactctggttccaggcgccattgcttctgaaaatgccgaagtggtcgctaatagtgacattatcattttagcaattccactaagccgttataaaaatatcgatcctacgttacttaaaggtaaattagtgattgatgcgatgaactactggtgggaaacggatggcattcgcgaggaggtcctagatccaaccttaacttctagtgagcaagttcaaaactactttaaggacagtactattgtcaaaacgtttaatcatatgggataccacaatcttcaagaagaggctttaccaaaaggtgatcctaaacgcaaggctttgttcgttacgggtgataatcatgcagctgttgatgaagtaacaaaatttgttgattcaatgggatttgaccaagtggttcattataagctcactgatggaattatgactgaacctggtagtccactgtttggggctagtctaaaatatcaagaattaaaacaagttattgataattttgaccatattgactttggacgtaaaattagtagtactttgaattgaaaaaaactaccttgaataaatttcaaggtagttttttatatatcttccagataagtctgttaaagtaataattatttttaatcgagagctagatatattgattgaggaaatttaaaacagtaggatatacgatttctaaatatccttttgcatgctgagtaccaggtaacatccattccacgaagggaacgtttttactagttaaaatttttgccatttctaaaacaccacttgttggcacaaattcatttaatgagtttgctaaaaacatcggtccgggttgactgttgacatgtttgtagggggttgctagtgaatattgatctgagtttccgttaaaataattagtaacaaaccatttataaaaagcgtcgttttgaccagtctggtttatttcagaacttttggaatttgtaaaatcttgtttatgatcaggttgagcaattacggcagtatgctcatttaaccaatcatcaatatcaagaattccagacaaagaaacaatcgggagtccatatttaattcccatttcgacagccatgtttccaccagcagatgagccaactacggcaattcgatcactatcaaacaattttgaagaagttttaatccagtgatataaagtatccatatcatctaaaggtgctggataataagcgtctggagttagtcgatagttaggaacaataacggaaaatccgtcccttaccaaagcttctgctaaatcttgatctttagttttatcacctctaaaccagcctccgccatggatatcaataatcaagcccttggaagcattatcaggttggtataagtcagcttttaaagcatgaatttcatcgtaaattaaatcattcttaattttcattacgttccttctctctagttatttgaaaggtttggttatcactctaaaactagtctaatttagttgtcaaaacaggtattagtttaataatcaattcatctcgacgccagtttattacaactaatgagctttttcaaagattaatacttgcatttaattaacgattaacttacaataagtaagtgaaatagcaagtagaaatctgttactattctgttctttgctatcagtaaattttagaatagttaatcttaaaattagtagtgatttggatgggggcatatattatgacaatgattaatggttatgaacaaagtgatcgtgaagaaaaaattgacattttaaatttggagtctttggaagaaagagccgaaaagattattccaactggtgggtttggatatatctctggcggttctgaagatgaatggactctccgacaaaatcgaactgcattccagcatcgacaaatcgcgcccaaagctttgagtggaattgaaaaaccagaactaaatacagaaatctttggaattccattgaatactccagtgatgatggcgccagctgcagctcaaggtttagcacattcacaaggtgaaaaggatacagctagaggccttgccgcagtaggaggcttaatggcacaaagcacatattcatcagtttctattgctgatacggcagctgctggtgaaggtgctcctcaattcttccagctttacatgagtaaagactggaattttaatgagagcttgctagatgaggctaaaaaagctcatgttaaagcaattattttgaccgtggatgccactgttgatggttatcgagaagctgatattaaaaataagtttgcatttccacttccaatggctaacttaactaagttttccgaaggtgatggttaaggaaaaggaattgaagaaatctacgcttctgcagctcaaaatataagacctgaagacgttaaaagaattgctgattacacacaattacccgtaattgttaaaggaattcaaactcctgaggatgctattcgagcaattgatgccggggcagccggcatttatgtatcaaaccatggaggccgtcagctaaacgggggacctggatcttttgatgttttggaagatatcgctacctccgttaataagcaagtgccaattatctttgatagtggtgtacgtcgcggttcagatgtatttaaagctttggccagtggcgcagacatcgtggctttgggtcgtccagtaatttatggattagctttaggtggtgctaaaggggttcaatctgtatttgaacatatagaccatgaacttgaaattgtgatgcaactagcaggtactaaaaccattgatgatattaaaaataacccattactaaatatcaaatattaatctaaaaaatcctccaattttgggggattttttaggtatcgaggaactgttttgatgtgtcggctactagatactgatggatatttattgacttaatagccaaatgttataattgtggtataaaaaattgataaaaaggatgcaatttattatgaataaagaacgctttgaggcttttacggacgccgtaattgccattataatgactattttagtattagacatacatctacctacagatgatcattcgatgcgagcgattattgccattgctccttcatttcttgcatacatcgttagttttacaatactagcagtcatgtgggttaaccatcataatttatttcttcatgtgaaaacagtaaatcataaaattctatataccaatatatttctattgttttgggcaactttattaccagctaccacagcctggtttggttcagacatctactcatcaacggcagcttggctgtacgctgtcaacgtcattgtttacaacatttctttctcaatggtgagaaatgaagttttaaaaatcaatgataggttgaagcatttatacattacagagatagcatcgctgattttaaatattgttgcattgtttattgtattcttctggcctccctttattatgataagtttgttaatggacattctactgtggtcgattcaaccggtggttcgtcataaaggataaggtgagctattgattaatgcttaaattagttgtgttctaataaaattgttaagataaaaaactccgcgctgttattagtgagaataataacagtagggagttttttgtaattaaatcatatttgatgctcataaaaatatgccccgacaaaatcgaaaacatatttaacgactcttttaaaataaatttttctcagaaagttcgttgatagatttaacgcccaacagtaccaagaggctctttagttggtatttcatctgctcaatcatttcaaccataaatgcatcgtcatggtggagtagctgatggaggaagtagcccgcaattcccacgttatcagcccctaaagccagacttttaataatatcacttgaattacgaataccgccagtagcggtaattgacaagccatcaaccgtaattgatttaagtgactctaccgttgttaaaccaaacgatgtcataaaatcaaaatctttagtgtgacgacgagcattttcgatttgaataaagttagtaccgcctcgaccaccaacatcaataaactttacgccaactttttttagggcgagggcatcttgatgagtcattcccgcaccgaccgctttaacaatcacgggtactttcaggttagaaacgatttcagcaatatgatctaggtaatcaaaagtacggtcaccctcaggcataactagctcctgagcaacattgatatgtaactgtagggcgttcgcttgaagcatgtctacagctgcctgcgctttagcaacactagcatccgccccaacattcgccataatcaatccttggggattagtttctcgcacaattttaaatgtgtctgctagttcaggatattttaaagcgactgattgagagccaacggccatcgctaaatcagtttcttgcgcaattttagcaagccgtgcatttaatttggcggtgtaggcacttccacccgtcatagcctgaatgaagaagggaaggggcatttttagccctgccagggtagtttctaaactaacctctgaaattcccgtttcaggtaatgcgtttggtaataagcgaattgtatcaaacccagcactggcagtcgggctgtaaaatttttcagccaatgaaatgtgttcatctttacgatgagaatgaatatttttcatgacaactcctaattaatttctgtgacatggtgaacatctaaatcaaggggtttgatattatgtttctcccattcagcaaacatttttgctgtcttcgtggaattgggcataatgacaatgccacaatcaccaccaccggcaccagaagacttagcagctccatcaaatttttcagcaatatcgcaaaagttggtaagcgtcgtggtctcaatcgaaacgccactaaataagcttaactcttgtaataggtgccgattgttagtgatctcacgttgaataactgtaatatcagcatcacgaaaaccatcaatcatcttattgatacaagatgcgcttttggtcaaaaactcatgatagctatccgtttcttgataactggttgtagcaacttgatcaactaaatcagaagtggaggccggggagcccgtccaaccaatataaaggcgtaaatctgatggaggagtgagtaattcaatttttaattgaggccaaggcgttcttaaaattgtttctaaatctttagtacgacgcatactgtttaaccagtctcgattgaaagattggtaagcaatccaaccgccataaacgctagctgcaatatctcccaaagaaccgtttccttgcacatctaaatgtgcaattgatgcaagtttgaagagtagttctttagttaacggaatattataaaatttggccacaactttaatggtggcgacggttacggccgcagaacttcctagaccatattttttaccatcactgctgtctaaatcactattgatgtataaattataagtttttaatttacgattaagcaaaacagctagttcttcaataatcgaaatagctgaaaggatatagtgataagggttgtcccggttatcaaccactaattcactaccacgacgtcgccaggaaagaacattattttgatattgtttagaaataatatttccgacggttaatttactaggttcaaggctggcagtgacgaattgattaattgccactagcacggcattattgccaggttcgacaatggcatattcaccagcaatatataattttccgggagctttttctgttatcaatttaaaattcctcttagtttttagtaaatttaattccactaccaggcttagccacgactaattgatcttgatcaaagtagctggcaaagaaccgcttaacccgcgtaatgtttttagattggcacagaactttaacgttgggtccagcatcaatggtgtagtaacactcaattccactttcacgcagttgttcaaccaacttaatcgcttgaatggtttcaggtgcaaaataggtaaaagcaggcttagaagataaagtcgttgcatgcatcatggctgcactgtgttctgccaattcaccaattttagtaaaatcattgttttgtacagcactaatcatttctggaattgcttggttagtagcttccacccacgcaggatagaaaggcgaagtactagcggtatgttgcattcctagcgtacttttaactttcttttggcgtcgatcaatgacgatagtaaccatatttaaatcaattaggtcttcagacacaatttgttcggcaaaggaactttgatgatcatatccgcgatgccaatgcacaattccgccgaaaactgagcgcgaagctgaaccggagcctaaacgtgctagtcgtgagagattagttaaatcagtatgtgaacctaaagcactcactgcggccccggctagagcagccatgcctgaagctgaggaggctaagccagcggcagtaggaacgtgattttcagattcaattttagcaaaaccttgataaccaaattcacttttaaccgcttctaggacgcgattaatacgttgcatctttttaacatcgattaattgatgatttagataaaaaagattactagtgtattcatccgaaaaggttaccttagtatcggtataaaatttgtcgagggtcaaagaaatactgtcattagcgggtagaattaaatccgagttaattttaccccaatatttaagtaatgcaatgttagtgtgggctcttgcaaaaccatgtttttcattcatacgtatcgaaacctacttttaaagtttttcaatccaagtggccgtggctccgccagcagtaagttgctgactaattttttcagcagctggaaggttaggagcaagtgaaatcacacatcctcctaaaccaccgccagttaatttactgccaagcgcacctgaatcattagcaattttaattaatttttcaacagcagggtgactgactcccaattgacgtaagttagtatgtgcttcagttaaaattttccctaacgtacttacatcattttgacggaggacagtcgcagtctgactagtcaattctcccaatttttcgattaaaagtctactgtcagagtcaaatcgaagcttatttttaacgatttcgactgcttcactcgttttacctttaattcccgaatcactaattatgaggtaagcgtcgacgttgattggtaatggcttaatggtaccatcttttttaaaccagattggattattagcacttgcagtagcggaatctagcccgctaggctttccgtgaataatcttttctgaaatatcgacagtttttagaagggtcgttcgcgttaagggatgttcaaaatacgcgtatagggcccgtactagagcaactgctgtcgatgctgaagagcccattccgcgttcggctggaacatcactatcaatggtaattaataaattagtattggggcgattaagctcgtttaaagtttgtttaattagatttttaataccaagtagattactatggatatcatttagagacccattaaagtagcggcttttgatttcaatgtcgccattagttggttggattttaaccgtagttttaacattacggattggtaatgcaattgcaggctgtccatagacgacgctatgttcgccaattaaaattatttttgaattactactctttataatttcttccacgacgatactcctttttggtccaaattaaatgataccttaaataaaacaattgttctatgtagagaaggtaaacatttggtaaaattaataggtagataacaaagtggagatgtgaaatgaataaaacaaagtatgccgtcgttgatttagaaatgacaggtagtgatttcgatggtgacaatcgaatcatccaaatcggatgcgcttttgttgaaaatggaaaaattgtggatacctttcaaagtaaggttaatccgcaaagaccgattccagcgggaattactaaactgacaggaatcaccgatgagcaggtgcaaaatgcccctaaatttaatgatattgtagatgaagtatatcgaaaattagtcgatactgtttttgtagcccataatgtagaattcgattttcccttcttgaatcaagaattggttcgtagtggatatcccgaacttaacattccagctgtcgatacggtttccctcagtcaaattgtcttttcatttaccaagggttaccggctacgtgatttaactagctatttaaaaattgaacatgatgatccacattccgctgatagtgacgccattgctacagctaatttgttaattgcgatcaaaaaaaatctccaacaacttcccattgtaacgttagaacgtttagtggagttaggaaaagacttaccacgccaaacgctatcgattttaaaggacgctctacatgagaacaaacaaaatccgcaaaaaattgatgttgatttaatggtggtcgatggcgttgctttaaaaaagccgattgctttacaaactgaacaccaagcagacgagaaattggtttatcctcggggaaaacgagaaaaggaacagttatacaatggaaccttaagctggcgtaaattacagggttcaattatgaatttcacccatcaacagttttcggttacggaaggcttcaaaaagcatgtggttattgaagctcctaccggatctgggaaaaccttgggttatttattcccattgagttatattgcacgtgaacaacagcgtaaagtagttgttagtatacctacaaccattttacaaaaccaagttctagcagtaggacgtcagcagttaaatgctattttagaaacgccgatgcagtttgcaattctgaaagggagtagtaattatcttaatttagaagccttcatgaaaagtattacccatcaaacgttaagcaaagattctcgcttggtggccatgaagattctggtatggcttactaagacggatactggtgattttgatgaaattaaccaccatattaacttttctaacttcgtcgatggcataagacatcatggaaaaaccgtgcttaacccgaaatctaagttctttgagtatgacttttaccgtagagcgatgaaaaagctgaagtatgcagactttattattaccaatcatcgttatttagcattacacgccgatgaaattggagaatctgatcaacaaccattactagtgattgacgaagcccagcattttccaacgattgtttccaatatgaatcaaaaatttctagacttaaacgagttgatgatggaaacccatcggttagttagtcgtttagtaatgaaccataagcgcaatttaattcaagcgactaaacatcaacccttagctgggtttcatattcggcgctttgttaacagtctcgagcatattaatactcaaattacggagattcaacaaaagctatttgataaatttgtggctcctcgtaagaaaaattcatatgaaaaccaaccagccgagattgtcattaaaaataatgttattaaccaaatggctaagcacgaatttcatcaagtggttcaggaattggccaatacatttattgagtttgatgcgttagatcgcttttttaaagaccaagaacttactccggaaattagggatgattgggctcaaatcaaagcttttcaaagtaatttaacgaaattctatgatgctattcgagaaattactgatcatctcaatcaaaatatttactggatcacgctaggtccaaatcatgatccgggaagtattcggattggtaaagaaattttagatacgggagaattctaccggcaaaaaatcgaaccattttatcataaggttcttttaattggtggaacgctattctttgaacataagcatagttacttcttagaccaatttggcttgcataaacccgagacatcgatacggactttcagacgcggcgtggacttcgaaaaccagttagattttgaagtactacaaagcgactttacgattgattatgaaagcaaccaggatcaatatgctgactttttggcagaggcaattgaagcgttgacgagggatattaaccgtcaaacgctagttctctttaattctttagaaaccttgcgaaatgtttataataggttacatgattctgatttaaacgaaagtcgcaggattatcgcgcaaggtatccatggttctaaagcaaaaatcattcgagagtttaacgatgaagaaaatgctattttgtttggagcagcctctttttgggagggagtcgattttccaggagatcgtttggaatatttaattgtgactcgcttgccattccgttcaccggaagaccggatggttcaatttgcacgtaagaataagcgctcctcctttatgagttttgtcttaccagatgccttgttaactttcaaacaagggatcgggaggttgattcgtaatagtgatgatacaggggtagcagtaatgttagataaccgtattattaataaagattatggtaaattgtttattaaacagctgccaagtggcgtaaatgccaatttaggtaatattaatgaagtcaaagaaagagtgaataatttctttaataatcaagaatagctttctttgaagctgacttttgatatataatcattttgttagtgttagacgaggggtattatggcagaaaaaaataataagcatccattttggttaaacgcctttattgtcattgcaacggttgtgggctcaatatttattatcgtgcaagaaattaatcgaccagagcgctatgacagtaaggtagcaaccgaaattgcaaagaaaaataccgatttaaagaaagtcgatcgagtaactcgatttgtatataatcaggttgaatatacggtctctggaaccaaggctaatggaaatagtattttcgttgtgcttacggataacggcaaaaaggctacagtctatgaccaaacggcaggcgtaagtgaacaaaaagccatcgctagtgttcaaagtgatcctaatctgaagaaaattacttctagtcgatttggagttattaaaaacaaaccggtctggatggtttcttatatcaaccaaaaagatagattagttactaaaacgattaactttaaaacgggtgaagaacttaaaaccattacaacatactaataggaggaacaaatgcaagatttacttcttagtcttttagaggacgggagtatcagcattgctaactttttattagataactatgcaaaactcggcatgacaaatgacgagtttttgctttatctacagattaaaaaggagcaatcacggggaaattcatttcctcagatggataaacttgctgatagcctcggaatgactagtcaaaacctcttttcgaccatccaagcattacaagacaaaaagattctagaaattaaacagcgaaaagacgaccaagggcggttaaccgatttttatgattttagcctgctttatcaaaaaatgattgcgttatttgataataaagtagaagaaactgaaaaggtggcgaccgctaagcaggaaaataatatctatgatcaaattcagattgagtttggtcgacctttatcgccaattgaaattgaaaccatttcgcaatggattgataccgaccatttttcttatgatttaatacgtttagctcttaaggaagctgtattaaatcaagcatataatttaaaatatatggatcgaattttgttaaattggcaacaacgtcacttaaccactccagctcaggttgaaaatagtttgaactctcgaccaactagtcaggatacgagttcatcgaataaagataatcaaaagaagcatatccaaattccactggttaaattaactaaagacaactaaaaaagatcatctcaatcaatgagatgatcttttttagttattcagaatcactagcagagctagtagaagttgttgaagcagaagtggtaatagaagtgctatcacttgtcgtatcattactgcttacgttagagctataggatggtgtgctggagctatcttcagaagaagtatcgttgctgctactatcatcgtcgtcagcatcagaactactataacgactactataagaagagtttgaatgcttgctagaataacttgaccagctactgctactgttgttcttagagtattcatcactcttgccagtctcatcataatcttcaccaatttgataatactggttagtaccttttttaccaactgttgaaggcatggtccagtcttcgttggaagagtattgagataggtaataaatcatatacttccaataatactgagctaactcagtttgtgattgagttaggtaaccagtcgaagtatttggatgatcataaccagtccaaacagctaacgagtaatccttggtataaccagccatccaagaatcactagatgctgaacttggaatgtcatttgcttcggtagctttcttcgaataggctacggtaccagttttagaagccatattcatgccagtaatattagctgcagtaccagaaccttgcgagtcagttgtgactccttttagaatcgatgttatcaagaaagctgtagccttactcattgcacgaacacctttagacttgtaggtataggttttaccgctattagtatcaattttattaatataagttggcttatgatagataccatcattagcaaaggcagcataggcagcggctgtttgaagtgtagaaatgtacaacccaattccattattaaggttatagggttccttacttgtaattcctaaaccttcaaggaaagttgttgccttggaaatgccgacatcttgtaaggttcgaatcgcaggaacgtttcgagattgaattaacgcatctcgtactgtcattgttcccttaaacttatgatcaaagtcataaagttttgtgtctgttccaggataagtaaatggagtatctttaacttttcgatacgtcgaccacttaagatattcaaatgcgggaccgtaatccattaatggtttagcggttgaaccagagctacggtcagtttgaacagctcggtttaaaccataagtaacatcaccagttttacgtccaccaatcatcgcggcgatttttccatttttactattgactaacgtggcaccaatttgaagctcatcatcgttaaattgtaccgtttggtcattatttgctaaatcgtaaagtttcttttgagccgcatagtccatgttagtataaactttcaaaccacccttagcagtatcaaatcctttatcagaaaggtcttgtaacacttgtttaatataaggatcaataatcttgtttttcttagctgagttagttgaagtttcatgggtctctgaaagtccatcagagatactttctttttgcgcttctgttgcttgagcttgagtaatcactttattagaagccatggcttgaagaaccgtgtctcgacgggacttagcatacttagggttactaatcggatcgtaattagtaggggattgtggcataccggctaataaagccaattgagctaaatctaatttttcaagcgacttaccaaagtaatacttagccgctgtttgcataccgtaaataccattacccatgtaaaccttattaatatagaattcaagaatctgatctttactatatttcttatcaaccttcaaagctaaccaagcttcttgagccttaactcttaaagttcgatctgatgcgtccgtagagaatacagataatttaaccaattgctgagttaaggtactagcgccttgtagacctaaagaagatcctgtaaggttagcaactgttgctcctacaatacgaatgggatccacaccgttattcttgtagaagcgacgatcttcaatcgaaacaatcgcgttctttaaagtctttggaatcttgtcttttttaacatattcacgattttgtgatcccagacgagttaatactttaccgtctttatcgtaaattacagtggcgttatcactcgataatttagcttccgtgattttaggagcgctttgagcatagtacataaagagcccaccaccgaaaataattatcgctacaaaaactgctactgctgccaacaataacttcttaattaaggaagaatgtcggttggttttagggtgtttacccatttttgaatgttgcgttcgtcgcatgggtcgattttggtactgatttccgttgttcatagataatctccttgctgttagaaaatcgattttttataaattctctataattttatcaaccgcttttaggtatggaattaagggattcatttggtatcccaattgatatccttgttcttcaaataccgaaaggggaatcgattttcgaccaccattttctttactatcccaaaactgaaaaagatctttcgtcttcagtagaaatatcttgttcaattttacaaactttataattgtaaagcaaattccaccaactttctcgcaatccttcatatgattaatttgatgctcatggaaattacttaaaggaaaggaagtagaattggttgtttcctttgcgtcaaaatcgatatacttacctcgatatactccattatagtcagtagtggaagccttactaaagtaagcctctttaatctgtgccgcgctgcgtttaggataatcaaccttcacaatttgaattggtgttggttttttatgaacaacagcaaccccgtggcttagataataagcgttactttcattaagttcttcttctaaggacatacctcttttaccgtaaataggaggcatgctaaccttggcttggctcattttaggagtggttgcttttgacccagttggataattaaatttcaaagatacgtcctcctgttcatctattatactatggtatttagtttgatagattacaaatagtttaaaaagcgtatatcatatagaaaataaaacaaaatttaatattatgctaaatttaggattgaggtgagcgttaatgagtagattatgggtgacagggtatcgtagttatgaattatcaattttttcagaccaggatcccaaattaaaagtaattcaaaatgcactgaaacgaaagttaattgagaaagttgaatctggcaccacgtggataattgctgggccacaattaggaactgaacagtggtcgcttgaattagcaaacgaactcaaaatggattatccagaattacagacagccttaatgtttccatttagtgattttggtaaacagtggaaagaagaaaaagtcgagaaactagctttaatcaaagccaaggtagatttttttgctaatgttagcgaaaatccttatcaaaaccctcaacaattaagaaattaccaaaacttcatgttaaaccataccgatgaggcccttttgttgtatgatgatgaacatgaaggaaaaactaaatttgatttaaatgccattcgaagctttcaagaacataattcatataatgtagaaacgattgatttttacgatttagaagaagaatccatgttatatgaagaaaaggacgaataattctttgaattttttaaaatctttgatacaatgatacatggtaatttgaacaaaagtaatcgacgaggtgcaacgatggacaacattaattttactccaaaagatattttgcaaaaggaattcaaaccaaagatgcgtggatatgatcctgctgacgtggatacattcctagattcagtgattaaagattacgaaaatttcggtaaagaaattgaacgtatgaagaatgaaaatgatcgtttaactgacaaagttgacgaacttaataagcaagtttctgctggtggaactgttgaagaatcagcaccagttagtggagctacaaacgtagatgttttgaaacgtttgtcaaaccttgaacgtcgcgtgtttggtgctcaacttgaagatactgataatagttcacatcgtatctaattcaatttaataacactttgtaaatctcgggtaattgcggttagcatctgctaactgaggaaagtccatgctcgcacaagctgcgacgcttgtagtgttcgtgcctggtgaaaaaataagctggggcatttgctttgcaaatgacggcaagtgaacaagctaaagccttcggtcatgcttaagtagctttgaaaagtgccacagagacgatcttattaagaaattaataagttggaacgcggtaaacccctcgagcgggcaacccaaactatggtaggggagcttcacatctggaattgaactaaatgtgggggcagacattgtctggagatagatgattacccaaatttaaattttcctgagaatttattttggacaaaacatggcttatagagatttacaaatcaggaaagctagggtaaaagttatcttttatcctggctttttattttaactaaaatttataaatagggaagtaaatatgaagaaattcaatttaattgccacaatggcaagtggtttagaaagtttaacaaaaaatgaattaaaagatttaggctatgaagttcaaactgaaaatggtcgggttcgttttgaagggacctttgaagatattattaaaactaatttatggttaagaaccgctgaccgaattaaaatcgttgttggtgagtttgaagctaaaacgtttgatgatttattcgaatctgtaaaggcattgccttgggacgaattgatccctgtggatggagcctttccagttagtggcaaatctaaaaaatcaactctttttagtgttccagatgttcaagctattactaaaaaagcggttgttgaaaaattacgtgaggttttccattggcgtaatcaatttccagaaacaggggctaaatatggtcttgaagtagccattgataaagaccatgtcatgattacccttgatacaacgggtgatagcttattcaaacgtggctaccgtttacataaaggtactgccccactaaaagaaactatggcagccgcattagttttgctaactaactggtatccagacaaaccacttgtggatccattttgtggttctggtacagttttaattgaagcagccatgattggccaaaatattgcgccgggttttaaccgtgattttgcctgtgaagactggcccattgtcgatcaagaaatggtagaacgggttcgtgctgctgcagatgaaaaggccaattacgatgttgaattagacatcactggttacgatattgatcaaaatatgattgatattgcaactgaaaatgcggaagaagctggattatctggaattatttcctttaagcaacaagcagttaaggactttaaaactgataagaagaatggtgttatgattggtaaccctccttatggggaacgaatgggggaccaagagttagttcgaaagatttatcgtcaattagggactgcaacgggatcgctaactacctggagtcgttattttatcacgagtgatttagattttgaaaattactatggtcaaaaagtcactaaaaaacgtaaattatataatggtgctttgagaaccgattatttccaattctggggtaaacgtgaaaggtaggtcttgatagtgaaaattgcggttattggaaatgggattgttggcgcaacttttgttaatgaaattttagagcgatttcctgcataccaaattgtccaatttgacggtattaaagggactgcaacgacagcttctgccggaattattgctccttggttatctaaacgtcgaaataaaaaatggtacaatttggctcgtcaaggggcggaatatatgtaccaaatagcagaaaaataccgaatgcctccagcagtctattttaaaagtggcgtaatttatacacgagataataatgaaaagattagtgcactgctcaccttagctaaggaccgaattaaagacgctcctcaaatggagggatttcggcggattgataatgccgaaatcaaacaactttttaattttatacaaactaaaaataatggagttttagttgagggtggcgcacgaatcgatggacaaaaatttgttgaatttttgaatcagcgcaatcaaacaaagttcgaattacgtaatgaacgagctgttttatcaaaaaatggaacagataccctggttaatggtgaaaaatttgatttaatcgtcttagctgtaggtgcttggctaaaagatactttaagcgatattggcatcgaagccttaactcgtcctcaaaaggggcagttaattgaagtagagcttcctgggcaagcccaagttaatgcaagtgctcccgttttaatgcctgaaggtgaacgagatttcattcctactaaccaaggaactttactcattggagctactcatgaaaatgatcaaggatttgatttaacagtgagtgatcaaattattgatgatttattagccagtggacaacgagtgattcctaatttagataaatcgatggttaagaatacgcgcgtaggaacacgggcgtattctgaggactttgcaccattctttggctatttgccaaatcatccacaaattatggtagcgtctggattaggttcatctgggttaactacaggtccaattattggaaaactattagctgatttagtagaaaatcccgagttggatatgactgatttgactaaaccactgacaacatacattaagtagagaggtacatggtatgaagaaagtagaaagtttttattatcagccagattttttaaataacatgatcagctggtcatggactctaatgattctgattgtaggtattattttctggttagaagtaacaacatttaattggattacggcgactttttttgcattgtttatcgtagtaatcagtgtacaaactgtcagtcgaaccgttgaaataattggttctgagctgattattaatcgggtaatcaaaagtaatttcacaattttaagcattagtaaaattaaaaatgtaacgcaaggcaaaatgtcactaagttttgactatggcaataaaagatataaactattaatgagtcgtaagtcatcagataaattatttaaagctttgacaaaaaaggggtagaagattaatgaatgatattgaaatttcccagaatgctgaaatgttaccaattcaaacaattgctaaacaagccggatttgatgaaaaggtagtcgaaccttatggtcattacaaggccaaaattgatattttttccgagaaaccaagtacgcaacttggaaaattggttcttgtcacctcaattaatccaacgcccgctggagaaggtaaatcgaccgtaaccgttggattaggtgatgctttaaatgacttgacggggtcagcaatgattgccttacgtgaaccctcccaaggtcccgttatgggtatgaaaggtggcgccaccggcggaggttactcccaagtaatcccgatggacgacatcaatttgcattttactggtgatatgcacgctttgactgcagctaataatactttagcagctttgattgacaatcatcttcagcaaggaaatgaactcaatatcgatcctcgaaccatcgtttggcgtcgctgtttagacattaatgaccgcgcgctacgtaatatagttattggattgggagggcgctttagtggtgtgcctcgagaagataaatttgacattaccgtagccagtgaactaatggctatcttgtgcctagcccaagatttaaatgatttaaaggaacggattaaccgtattttgattgccaataactatgatggtcaacccatctttgttaaagacctacacattggtggcgctattgctacgttgctaaaagatgcgattaagcctaatttagtgcaaacccttggtcatactcccgccataattcatggtggaccttttgctaatattgctcatgggtgcaacagtgttttagccacgaaaactgctttacgacatgcaaaatatactgtaactgaagctggttttggagctgatttgggagctgaaaaattcctcgatatcaaaacccctgtcctgggaaagcaacctgatgcaattgtaattgtggcaacggtgcgagccttaaaatacaatggcggagctaaactagctgatttaaaaaatgaagatgtggaagctctccaaaaaggttacattaatttacaacgtcatatcaaaaatatgcaacgttataacatccctgtaactgtttcaattaatcattttattagtgatacagaccaagaggttaacacgctagttaagttgattgaagcggaaggtgtatctgcaattgttaccgatgcgtgggccaagggtggtgtaggttctaaagatttagccaatgaagtgattgccttggctgatactaatcagggaccaatgactaagttatacgataacaatggccgaatcgaagacaaaattaaaacaattgttcaaaaaatatatggtggtagtgatgtagaatattcaccacaagcacttaagaaaattaaagaatgtgtagcaaatggttgggatcatctcccaatttgtatggcaaaatcccagtattcattttcagatgatcctaaacagttaggagcaccaagtgactttgttatgcatgttaacgatattaacattcgactaggagcaggattcttagtcattcaaactggtaaggtgcttactatgccaggacttcccaagcatcctgccgcattagatatcgacatcgatagtaaaggagaaattaccggattattctagtaattaaagttttatgaaatggtttagttatatagttggtttattacttttagtaattgatcagctggtaaaaagcgctgttagtaatcagattgctttaggaactgttaaaagttttattccaggagtattgtccttaaccaatttacgtaatgatggtgccgcttggagtattttatcaggaaatcagatatttttttatctaatcaccgtagtagctttagtcgtattaatctatttactagttacacagcgccagcacttattatatcaatggggattaaccctcatgattacaggaaccttgggtaattttattgaccgcattcgtttaaaatacgttgttgatatgtttcaaattgactttttcaattttccaatttttaacattgctgatatgtgcttaacttttggtgtcatcatattattcattgccattattcgcgacgaaagaattgaggggtagttagagtttatggaacaattttcatttgtggtttcagatcaagaaagtgggcgtttggataaagtagttaccaatcattatccagatttaacacggtcaaaaatccaaaatttaattaaacaagagcaaattttagtaaatcaagcaccaaccaccaatcggtataaagtttcagaaaatgatgtaattgacgttactttacctgatccagtcgaagttagtgtaaaacccgaaaaaatgaatttagatattgtgtttgaagatgatgacgtaattgtcgttaataagccgcaaggtatggtagtacattctgctccgggacatgaaaatggcacattagtaaatggtttattagaccatgcaccattagcaacggttaacggagagctacgcccaggaattgttcatcgtatcgataaagacacttcgggcctattgatggttgctaaaaatgatcaagcaatgctgagcttaagtgcgcagttgaaagctaaaacgaaccaacgaaagtatttagcaatcgtacatggcaatttcaaggaagaagctggcacaatcaatgctccaatcggtaggtctaaaaaagatcgcaaaaaaatggctattgttgaagatggtcgtccagccgtaactcattttaaggttttagaacgttttacggactatactttaattgaatgtgagttggaaaccgggcgcactcatcaaattagagttcatcttaaatatattggtcatccggtagcgggggacccactttatggccctcgaaataccttaaaaggtaatggtcaattcttacatgccaagttattaggatttaaacatccgcgtacaggtgaagaactagtatttgaagttgatccaccacaaatttttcaagatacacttagtaagcttagaggaatttaaaaaagagttataacaaagattgatatttaccaatgtgtcttttgttataactcttttttctatatacttataaaataatgttatattaaggttaggagttccaattactgatataattgaattagtgagtttttgaaagaagaaggaggacttggcgagtatggaaaaagaaattatggatgccatggcaatgaaaagggctttaacaagaattacttatgaaattatcgaacgtaataaaggggtcgaagacatcgtattgattggtataaaaacgcgtggtgtttttattgctaagcgaattgctgaacgtctgaaacaacttgaaaattttgatattccagttggtgaattggatatagctgaataccgtgatgatcaacgtaattcagctgaaccacgttcaactaaagctaattctagtcttgctaaacttgatttaaaggctcgaaaagtgattttgattgatgatgttctctatactggacgaacaatccgcgctgctatggacgcaattatggatattaaccgtccagctcaaattaatttagcggttcttgtcgatcgtggacatcgggaattaccaattcgtgctgattttgtgggtaagaatattccaacagcacaaaacgagaaaattaacgtttttgtccgcgaaattgatgatgaagacgttgttctcttagaaaattaacatgatttaactgtggaggtggctattatggcagaccgatatttaatattagaagacggttccgtttttaagggtaaagcattcggatcgcgagcaaccacctttggcgaagttgtttttactaccgtaatgactggatatcaacaagtcattaccaatcaaatttatcataatcagattattgttttctctgaacccacaattggtgctgtaggaattgatcgggcgagctatgaatcggttgatcccacttgtaaaggcgtcattgttagagatgtagctgcggtttccattaatcgacgtcgccgcttatctttagatgaatacttaaaacggcaaaacattccaggaatttctggaattgacacccgtgctctgattaaaaaattacgttcaaccggaaccattaaaggcagtattatagatcctgttaaggatttggaacatgcttttgatcagctaagagctattgttttaactaatcaacaggttaatcaagtatctactcccaaagcctttccaaatccaggaaatggcaaaaatgtggtagtcgttgatttagggcttaaatacggaattcttcggcaacttagccagcgggattgtaatgtaacagttctggggtattcagctactgcggatagtatttttagtttagatcctgatggtgttattatttcgaccggtccggggaatccgcgcgatttgcctccggaagtgattgagatgattcagattgttgagcgtaatatcccattatttgcgattggattgggacacgaagcttttgcaattgcgaatggctgtgaaattatggaattatcatctgaacaccatggttctaatcatccaattctatctgttatcacagatgaaattatgtacgcctcacatggacaaggatttacggtagaccctaattctgtagatcgtaatgatttaatcgtaacgcattacgatttaattgatcactccgtgcaaggactacgtcaccgagattttccagctttcagtgttcaattctttccagatagttctcctggtccaacggaagctaccgaattgtttgatgaatttatggaaatgatgacaagagggggtcgttgatttggcaagatcgcgtgctaaaaatattttgattattggagcaggaccaacacaaatcggacgtgataccgaaagtgaagcggccgccgttcaaataatcaaaaattttgctgaaactgatcgtaatttattttatgtcactagtgatgcaaattcagtgattcctcgtttagatgttgatgttaaatttattgaagccgaattaacggttaacagcctgatccaaattttacgagaaaatgaaatagatgttattttgccagtggctggaaatacagttgctttgcagctttctgaacaactaaatgaatcaggtattttaaaagaactcaacgtccgtaccatgggggtaacaaccactactattcataatattaacaaccctgagttgatgaaccgcgttcttaaacatattaaagaaccaactattcctactacggttgttgaaaatgtgacagatgcgttaagatttgcgaaaagggttggattcccggttttgattaagcccattgcatctttaactaaaactaaccggattaagtgtgataatgaacatcaactaatggagatgcttgaatcggcattcaaggtttctattactaatcaagttgctgttgaaaaaagtgtagttggctataaagaaattgaaatgattgtcattcgtgacgctgaaggatcaaagcttttaattaacgggggcgaaaactttaatccaattggcgttcactctggagattccattatttttagtcccacccaaacactaaccgacgtcgaatttcaatcgctacggacggctgctctaaagatagctgaaatcttgaaaataaagggagtttgccacgttcaatttgccttggatccaacggatggcaagcattttatcacccggatcaatccctttttcgatcgatcatcggcatttgctgctagggcaactggttatcccattgccaatgtagttgccaagatcttaatgggacaaaacttacgtgaaattaaactttcgggagttcaacgccatgattcattagcattgattgaacccgtgatggatcacattgcagtccgctttccaacttggtcttttgccagctttaaaaatgctaaccaacaacttaatacccgaatgaaatcgacgggttcggtaatggcctttgggcgtagtgcagaagaagctttacaaaaggcgattcgttcagttgattcaactacggcagccgaacaagcagccttagatgaatcccaactaagtgaagcgcaattaattaacgttttgatacatcctcgtgctggagaagtttattacttgttagaagcaatccgtcggggatacaccgttgatgagctggctaagatgacgcatattgacgctttctatttctataagttacgtcatttagttaaactagagcgacgacttagagataatcgttttgacatggcagccttacaagaagccaagtatttcggctttggtgatacgcaaattgcccatctttggcaggtgagatctgatgaagtccgcgattttcgtattaaaaaagctcatgtatttgcgacctataagggtgtggaaccaactgctggagaatttccttacctaactaatacttactattctacttttgaggatgaggatgaagctgttcgaacaactggtaaaaagattttagttctcggaacagctaacagccaagttggtactaatagtgcagctgaatatacaacttttcagacaattcaacgttgtcagaaattagggtacaaggttattttgattaacaataatccgaatgcgttaactttaattcctgatttagcggataaaatctacttagaaccactaaccgttgagaattgcttgaatattattcatcaagaaaaacctgataaaatcatagcccaaggaaaatgggaaattgttacccaattagtcttgcggaatgttcaggtggaacagcttcctgttagtcgaactactcgatcagaaaatatcgaggccgattacatgggtgttatcagttccatcaatggttctatcaacttatttggcgttgttggtattgatgaagataatatgtttattccaattgaagtttcggaagcattaaaagttaaagtagatccgttaattaaaaatgcaaaccagcatattactaataatggtatttattcagttattattaaggaaaatatgcatcagcttcaaattgtaagtgttgtgcctttagcggtgcaagatttaccatttttatcatttgcttttgatcaagattttgctggtataatcatggagattaccttgaatggatcaagtaaaatcgaaaatcatccgataatccaaggtgattatcgctattcacatgtttatccttacactcaatttggtcttaagaaaccgcaaaatccaccattctccttagcaattggtgctgaatttcagtctataaaataaaaaaaccactttatgaaaattttatttcataaagtggttttcgcgttttaaaagtacctaaatcataaatggacgaatcgcctctaaactaggtgtaactttgatagttttttgtccttcgtaaattacaaaaccaggtttagaaccattaggtttacgaatattacggacttgaacgtagtcaacagctacattagcagaattacgagccttagaatagtaggctgcgattgtggcagcttcctcgatggttttttctgaaggttggttactttcaatgattacgtgagaacctggaatatcttttgcatgtaaccagtaaaaatcttttttagccgtcttcatggttaaccgatcattttgagtatcatttttaccgactagaatggttgtatggtcactagcttcaaatcgttctggtttactcttagttggtttaatccgttttttagggttaacttgctttttaaggtaaccttcattttccaattctaatttaatatcatctaaatcttccggtttggctaagtcaatttgagtttcaatgttgtctaagaaattaatttcactttcagttttagcaatttgctcagaaacgtacctcactgcattcttctctttttgatacttcgtaaagtatttttgagcgtttttggaaggggacaattgatttgataaactgattttaattaacttattttcatcatagaagttaggtaactcaatctcagtcatacctcgttcaatctggtgtaaataggttgttagaatttcacctttgacacgataagtatctgcaagcttggtttgattcatagtttgttgtaatttttttagctttttccgattctttttcagctcattacgaactactcgaattaaaacgtgcccccgttgttgaacacgatcgcgttgaaccttttcataataatattgatctaatgtttctgaaagactagcatattggtgaacgttattttcgttaacatctaattgaggtttaacggctgcaaaagtaagctttccggctttgttatcataaataaaaccagtaggttgatcaaacttggctaagtaatcctgaatggtttttaaggaatctttagcgttaaccatctcataggcgagttctaaggctgtttccttaccaaagccctggaaggttgttcgaatagcttgtgcaagtacctcataattagggtatttattttgtaattccatcatcttttcagcgtcagctacaaaagggttgagtaaatcttgggctggtggagtcagatattgggctcctggtaccaacattcgataacgattttgatcagaagaaatatgtttaatcgtgtcaataatcttgccagttgttgacgagtggagaacaatattgcttcgtcgtcccataatttcaacggataaaatcaaatcttcttcatcaccaatatcgttacggtgagcaaaatgaagattaatgattcgatcattttcaacttgtgtgatgtcctttagaatagcgccatcaagatgttttctaagactcataacaaagttactaggcgtagaagggttggttaaggtttgttccgtaatttgcgctctggcgtaattagggtgagaagataataataatgctttgttcttacgatttactcgaatcgtaagaacaagttcgccttgataaggttggtagattttagctacccgaccagtttttagtgtattcactaattcttttaccatggcatgggtaaataatccatcaaaagccatattttatcagtccattctatattaaagtgagatacctaagtataacgttaaaaaatatttgttgcaaaaatacttatatttgtaccatacaagtatttttgttgtataatacaaatataggtttgattaaaggagtgttattaaaatgattggtaatttagaggctttagagatcatcaatcgacaaagatataactttttgaagagcacttgtatggaaaatggtgggacgattgcagactggaaaattaccaattttttaaaagatgatctattgtcggttcaagattttgttgataaaagtggtttagatatctcgacactcagtcgccaagtaaagcgtgccgtagagaaaaaattaatatctcgaaataaaattgaagcggatcatcgtcgaacgctgtttaaaattaccgaaaaaggtcgtcttttaaaagatgaggttaatcgccaattagatatttatgatcaaaaactatttgaaaattggtcaaaagaagagttgtcgatgttcaatattttgattaatcgagttttgaaaaatgccttaaaatagtagtaattagtccgttatagacgagaaattgagactaatttatgttatagtatttgttattgatttaaaatgaagtgggtgtactaatgaaaacagctattgttactgatagtacttgttatttaactgatcaagaaattgcagacaacaatataaccgttgtaccaataccagtaattatcgacggcaaaatctataaagaaggcgttgatattactacagaggagttttatgaacgtttacggacttctcaatcctttccaagtacttctcaaccaccattgggtgaaatgattgaattatatgaaaatttagctaaggctggatacgatacgattatcagtattcatctggccagcacgatttcaggcttcgtttcaagtctaaagagtcttgagggtaccatcgaaggcgttaatctggttgtttatgattcacaaatcactattcgcttaatgggaattctagccttagaggctgctagattagctcgtgaaggaaaagatgttgataccattttagaacgtttggactatgtccgttcgaccttcggagaatattttgttgttgatgatttacaaaatctcgttcgtggtggtcgactttctaatgcttctgcttttgttggaagtttattgaaaatcaaaccaattctaacttttaatgatgcgcatgaaattgtggcctttgaaaaagtacgttctcgtaaaaaagcgatcgcccgcgttgaaaaactttttgatgaagcttaccgctcggctgagtatcctctacgggcatttgttattcatggtaatgatgaaaaatcagccttgaaatggaaggctagcttagaggaaaaatatcctcaattgccaattgatatttcttattttggccctgtgattggaacccatttgggtgaaaaagcgatcgctctaatttgggtaattgattatacaaaggcataaatctgcattcctagataaacaagtatgattccaaatcctaaacttgcacaactgtaaagtagtgcaagtttttttgttgtcttatcttgtcctagagtgactatttcgttagcaaaggtagagaacgtcgaaagccctccgagaaaaccacttattaataacaatttaagcttagaatcgtgaatagtaacggttaagaagccaatcaaaaaacaagcaatcatatttacaataaaagttgaccaaggaaaggcgtgttttttaaatgtttggtttaagtgcgtagttataaaaagacgagcaacagcaccaagggccgtacccataccaacataaactagaatcatgaaatatcaccaatcctttcgataatgtttgagtagtttaccacccagaaattgtccgaaattggctaaaattaaggatagaataacggatgtaagcaaaaaaataatcatcgtcctaaaatgtgctacagtaagttgatttaatagtgctaattcaaaagtggagaaggtcgtgaagccacccatcaatcccgtagttaatcctacgttaatagtatctgaggtatctaacaaggttaatagcccgcctgttagtattcctaggagcaaggctccaagaacattaataagaattagtgataatggaaaagaggggaatcgagcatcaaaatataactggagtagataccgtaagattcctccaatcgcgccaaaaattgcaacgcttaatgatctatttaacaatggttatcagcctttctaatttaatttttgattttccatctaaatttaataagttatccataattatcttgtttaagatttcagtattattacatttaggaagtgacgttaatatagtgtttgcagttatgctaaactgtttttagcagtttaaattaaaaggagctactttaatgtcaacattaatgtttgtacatgttatattatggattttaattggattaatttgtacatatggaattacaattgatcaatttcaccaaacactgattgcacagtattgtgcaagaatattggatatcgcacttattataacgggattagtgaacgttgttcatacagttgcaatgtcaccattgctagtctggattcaatttattctagaaattatcacaatcggactacttgattttacacttattagcaaaagaaataaaaagaatgttaaacctaagcctataatgctatttgttttagtttttgctgttactactattttaggtactgtaattcaatatttgtttggttaatctaaaataaaagccttcttaaaccagatttaaaactggtttaagaaggcttttttgataaataagatataaaactacctaagaaatatgttggtgaaatatgttggtgattaattaacaaatgagaggaggagagatataaaaatggttactttgtatttttctcattctagtttacataatatatattatacaaagtttataataaatcgaataatataaaatagtatttattttaaatattaaaatcacttttattcattcttatatttctcccaaaaaatagcaattcattttaacagacgtaaaatgaattgctatttttaatgtatttatttactagcattaaatgggccgctaataactactttgcctagcatatgtcctgtttcaacatcttttgttgctttcttcaaattaacggcattgatgccatcggaataaactttacttaacgttgtcgttagttggccttcgtccgccaatctagcaattacttttaaagcttgtccttgagtttcaatttgataattgtaatcggttttcgcaaacatgtattcccaatcaaagctaaccgacaaatttttccaatcgctgatatcaagcgcgtcatgaattcctacgatagtcccgacatgaccaaatggattaatcatatgtttaatctgacccaagtaatgagtgatatcgaataaaacagcaatatagtctactttttggacccctaattcatgcatcttatcctttaaatcatcatgataatcaatagggtgatctacacctaatttttctaaccattcgaagttttcaggactcgcggttgcataaatttctaacccagcccagtgtgctaattggttcaaaactgagccgacgccacctgctccgttaatgactaagatttttttgcctttgttagcaccttcttcggggattaaaccaaatttttcaaaaagcagttcatatgctgccaaagaggttagtggcaaagctgcagctccttcatccgatagttttttgggtgctaaagcaacaatgcgttcatcaacggcttgatattcttggttgctaccggcacgagtagttgtccctgcataaaagacgcgatcgccaattttaaacttctcgacttcttttccggtatcgactacctcaccaactgcatcgaagcctaaaactcgaagcgcatttcttttaatactatctttacgcaatttagtatcgatcggattcacagatactgcctttacttttactagaacatctctagattcaagattcggtactatctttttttcgtcaataaaacttctttcttcattaattggcaatccttcaaaaaatccaactgcatgcataaactccttttctaacatgtgaactcctccttgattttatttatctttttatgaattgcatcttttatttaatcacatcataaatatcagataggctttgacgcttcttttcaggtatttcttggtcccgataaccaaagccagccatataagaaacgccaaactcatccaaattgatgatttttttcttttctaaatagttttcaaccgattctttattaaaaccttcaattggcacactgtcaattcctaagtaggccgcagttgttagcatgctaaaggaatgtaggtttgttttgaggcccagtcgaacaatgaacgttcatcagttaaaccaaagtcgtttttttgaaagttattaaaaaatatcgtttgaggcgatgtttcagagtaaggaacaccgaatacatcttccaccatatgtttaacatgagggctattaccggttaagtttttgcgtgctagcacaattaaaaaatgactagctccatataaactatttcgtgctccccaagcaatatcttgtagatcatcttttatttgttggtttttcactaataaaaatttccaaggctcataaccaaaagaacttggcgacaaccgagctgcttccataatcgtcatccaatcttcctcggcaattttcttggtcggattaaaagattttgtcgcaaagcggtgcttgtgaacatatagtatttctttacgtaattctgtttgatcagtcattttttctcccttttaaaactattggattttgcaaaaagtatataaagatatctgaactatagttgatgaaaatttcaaagtaacgcatttttagagaaggacctttcaaaagcgtaatcaaatcatcttatcgctcgggtatttcgttaattaattatcttatattaaagatttaaataaagacttcaaaaccttacttttaggtattgagactaagagttgtacaaattgcaactaccgacaataaagataacgtagaaatccgagaactgttacatttaatgatattattttactttagctggacctttaccaataaaaatacgaaataagctataaggtttttcacgtaagtctttacctttatggaaacctggttggcgttgcaattggttagtattaaagtataagtattcatctggaccaattgacaaagtatcaggccataaaatacgaggatcatgagccaatgtttcgaatgaaccatcagtattaatgatacgaatactattattttcgaagtcaccagcgaaaattgtaccgtctgctgcagtaatcataccatctgaagcccccttttctccccagtctttgacatgtttttcaagttcttcatcttcaatatctttatcgaaaatcaaatcggtattaaataaaggtgacggcttgataatggactgaagtacaatgttttaccatctggtgaaattgcaattccgtcagctgccacttgccacggagaagttgaaccatctgcttcccgattcatcaagattttgccctctactttaggaacgaaatcagaatcaacggctgtagaacgggcgccatctaaaattcggaaggaatcgccagttccaagatcaacgacgatcaatgcacctggtcctgtaatggaagaatcagtgatataagctaccccttctgatcctcgacgcaagtcaatccgtacatcatttaaataagtagaatttagaacaacatcattggcaaaagtatagattttccggatagtattgctttctaaatcaatcgcaactaattttgctccgcctttaacaggaacatcaaagttcggcgcagcagtgtctaatacccatagagttccttcgccgtcagcaacgatactttgaacgcttaaaaaatttttctcaggatttttagggtcaaaagtgttaagttcttggctaggataagcaactagttcaccatccacaacttcagtaacagttgcttttacaccatcgccccattcaggaaagttaatgaaaatacggcctgtttctgtcacactgacacctgttggcatttcatcataaaaagcatgcacttgttctaattcaccaaaaaaattttctgtaggataattcatcatatgtcttcctttctgattcagataaagattattttacttctacctcgaaattcaatactccgcgggccaatacatgaccaaacatagtaaatcctaaaaaagctggggtagaatcttctggaatagcaactgtttctacatttaatgcccaaacagttaagaaatagtgatgcaccccatgtcctttagaggagcggttccgatatatttttttgttcgtgcgtcatttggtaattgaattgccttcgaaggtaattttgaattatccttgttgccagcatcttgtggtaatttgtttactgtagctaaaatgttataaacagcccaatgccagaaacctgaaccagttggagcatctggatcatacaaagtgacaacaaaactttttgtatcacttggtgttcctgtccagctaacttccggtgaaatgtcttgtccaccttcgatgccaaaatcaccagacataaattttatatctgaaagtctaccattaacaatgtctttacttgtgacatcaaaggatggcacattttgcaaacctaaaaatggattattcattgtacatctcctataaaaaataacgttaagattcatcaatggaaatagattaaccccccttgttaaagaagtaaattagggaaattatttatacttccggatctacaccttctttaattcaaaatcccatgattcccttaaattcaattgttcgtacaatttattggtgtcgctggccatcaagctctgtctctcaaaggtaagtaagaaagattggatgaaattgaacacttacttgcaaggtccttaactaagatcctcctaaaaattcttcttttaattttccggcatagcgttggttgtagttttctccccagttgtacagcatttcaatgactggtcttagtgagcaaccatagtcagtgactcgataaaccacctttaatttttttcctgaataacctctcgttcaaccagtttatctgcttctaagtcttttaactgaagggaaagcattcggcgcgtaattcccgggatcgtcctttgaagctcactatatcgtaattcaccatcaaagattaaatggtacaatagaacacttttccagcgtccagagataatttgcaatgttgattccaccgaacaaccttttttacagttgtatatttaggctgtatggatgttaactggaaagttagcatccttttgttatatgccggcttagctcagttggtagagcggcggtatcgtaaaccgtaggtcaggtgttcgactcacctagccggcatttgtttggatgcgccttaatgttaagttaaggcgcattttttcatatacagtctttgtttttaaggcgaaaattatggaggaaatatacaattgaatacacaagataaggatacagcatttcttggtcaaccacgtggattaatgacgttgttcttcacggaaatgtgggaacgtttcagttactacggtatgcgtgcaattttaatttattacatgtattacgctgtaaccaagggtggtttaggctttagtcaagccactgctgcttcagtaatggccatttatggttcactggtttatctagctagtgttgctggtgggtttatcagtgaccgaattttaggtagtcgaaaaaccgtattttacggtggtgtattgatcatgtttggtcatattgcactttcacttcctttcggtggggcggccctactagtatcaattgctttaattgttgctggtactggtatgttaaaaccaaatgtttctgaaatggttggatcactatattccgtggaggatacgagacgtgatgccggatttagtatttttgttttcggtattaatctaggtgctttattagctcccataattgtttcgtgggttggttttaatatgagtttccatgctggattctcattagctgcaattggtatgttctttggattagtccaatattatattgatggtaaaaaatatttaaataaagatagtttatatccatcagatccaattcaacccgatgaagtcaaaaaatttagtcttcgagttttaatgggtgtgattgtattagcattaattttagtggttatgtttgttgctaatgcattaacaattgataatgttgttctattaattagtattattgctgttattgctccaattgtttactttatcatcatgttttcaagtagtaaggtttctaaaacagaacgttcacgtttatgggcttatgtgccattatttatcgctgcaacgttattctgggcaattgaagaacaaggttcagttgttttagcattatttgctgctgatcgtactcaattaaactacggttggatgcatattacgcccgctaacttccagtcccttaatccattattcatcatgctttatacaccaatttttgcatggctatggactaagttaggtaagaagcaaccttcatcacctaagaaatttacgtatggacttgtatttacgggtctatcatacttatttattgctttacctggtttgatgtttggtactgatggtaaggttaatgctctttggttagttggtagctgggcaattgttgaaattggtgaaatgttaatctcaccaattggtttatctgtaacgaccaaattggcacctgctgcatttgcttctcaaatgatgagtatgtggttcttagccgatgctgctggacaagcaattaacgctcagttagttcgcttctacccaggacatgaagtagcttactttatcgtattaggtcttgtaacactagtctttgcactcgtactattaatttgttcaccatggattactaagaagatgcaagggattagataattaaatatttgaattcaagagatgaactaggttatgcttagttcatctttttattttggagggatttatggctagaaaagtaatactttttattgcaatgagtattgataattacattgctgacgatcaaggtgccgttgattggttggagaaaaatgttcatggtaccgaaagtgatgacagttatgagaaaatgtattccaaaatagatacggttattatgggaagaactacctatgaacaagtaacacaaaaattatctccggaaaaatatgtttatgcagatcggcagacgtatattgttacgtctcacctaggggaagatacagatacgattaaatactggaaacagtcgccagtagaattagttaaaagaatccaaaaggagaagggaaaagacatttggattgtgggaggagctaagcttattgatccgctcgtgcaagccaatttaattgatacatatattttaacaacggtcccgatttttttaggatcaggtattcgactttttgatcgattagaggagcaagttccggtccgtcttatagatgtatatcaaaaaaacgaattagtatattcgatttatcagagaggttaatagtttgaaaattgcagcaactagcgacaatcatttcgatgtgaacaaaatagatgaaaatcaaatggctcaaaaacaagccgagtatcttttaaaacaacatgtgggagtatatttaatagcaggagacctatttaataaatttaatcgaagcatgcagtacgtggaaaagctacaggaattagtgggagaacacactaaagtttttttcatagccggaaatcatgatatgttgaacgatatcgactataatcaattagaatcaaatttaagcccattatacttgcataaccagttctatgacgttcctgggactaaatggcgtattattggaaataatgggtggtacgactatacgtttgcagataatgttgataaaaccaccgaacagttttggcgttggaaaaagtctttctggattgatactggaattgaacagcctatgtcagatattgaacgaatgaatattgtgttgaagcaaactgaacaacaaatgcagcaggccagtcggagaaaagtgttatttatgactcactttgcagtaagacatgagtatattcattattccgaagatgcccgcttttggaacatgattaatggaatggcggggagcagaagaatggaaaagttgttggaaacataccagcctgaattggtgatatcaggacatttacatcatcattttaaaccacttgcaaagtctaatggaatatattataataattcagtcggttatcataacaaccgaatcaacgagtggaattcagatgatttcttcactgaatggactcagcgattgcttataaccgatctcaaataattttgaaaaaagtttaaaaaaaagcttgcaaaattattcgagattgggtattattattaagtcggatagataagacgacaacttatatggaagggtagcgaagtctggctaaacgcggcggactgtaaatccgctccttcgggttcggtggttcgaatccactcccttccaccatattgggctatagccaagcggtaaggcaacaggttttgatcctgtcatgcgctggttcgatcccagctagcccaatctagttttcagaaacatcatatcaatgatatgatgttttttgtatctaaatcaataaatcacaggtagttttaatatgtttcgtttttagaatggtattagtaattagttggaggtttatagcttaaatttttaattggaggctttcaatattggcctagttaatgataggataaggagaacaaaatgaaataaccaatggggggctttttttatgaaaattggatttattggtgtaggtaatatggccaaagcgattatcaagggtttgttaaaaaataattttgaaagcacagatatactggtacacagtgcgcatcaatcaagttatggacctttcgcagaaaagaatcaactaatagcgacaaaatctaaccaagaacttgttagaaattcggatatcattgtcatagcggttaaaccatacgtagtaaaaacggttatagacgaagtcagagatgatttaaatcatcatcagttagttgtctcactggcatcaggaattagtatagaagatctacagaccagcttagatgagcaacaacctatcttacgcattatgccgaatgttaacgttgaaattggcgaaggaatgacagcggtcgttgctaatggtgatcttaaaatggaaccatttcagtctggggttaaaatctttgaaactgttggaagtacaatggaacttgctgaaaaagactttccaattttttcagcaattgctggtagtgcacctgcctatgcttacttgtttattgatgctctttcacgggcgggagttaaacatggattaactaaggcttctgctacaaagatcgctgctcaaatggtcaaaggtagcacagaaatggttctgaaatccgatgagataccgtatgccttaattgataaagtatcttctccaggtggtacaacagtagcgggactcctagcaatggaagaagcaggcttttcaccagcggttgttaagggaatcgatgctacggtagcaaaagaaatcaatcattagaatcttgttttttggtctataccgatatataatggatttagattaaaaatttaggaggaaaatttatgagtacagttttgcgtcatgctactatttatactggtttagaaaaaattgaagatggttacattcgatttggtaaaaaaattgaagccgttggtccaatgagcgaatacaaagcccaaggtgatgatcaagttttctatgctggagaaaagattattgttccaggattcattgatgtacatacacacggtggatacggatttgatgccatggatggtgatccagatcaaatcaatgaaatggtaaataaagccgttgttaacgaaggggttaccagcttcttttgtacaacaatgacccaatcaaatgccaacattgaaaaagcaatgcgtggggttgcgaaagctgctgaagataacccagttatccaaggggttcatttggaaggaccatttatttctactaagtataagggtgctcaacctgaagagtacatcaaggatccagatgcagaacttttgggtaaatggaatgaattatctggtggtcgtgttaagttgattacaattgcacctgaacataagggatctgatgcttttgaagcttactgtttagaccatggaattgtgccttcagtgggtcattcagacgcaactcgtgcggaactactaaatagtactgttactcatgcaactcatctttacaatgctcaacgtgagtttaagcatcgcgaaccaggtgtaactggacacgttatgttagaagacaacatttacgctgaattaatttgtgacggcttccatatcgttcctgatatgcttaaattagcatacgaagttaagggaccagaacgaattgacctagttacagattcaatgcgggctaaaggattcgctgaaggtgaaagtgaacttggtggacaaaaagtttacgttaaagacaaacaagcacgtttggaagatggtacattagctggttctgtacttgcatttgatgatgcatttagaaatgcaatgcgtttctttaattgcggaactgctgaagctgtacaaatgagctcagttaaccaagctcgcgaatttggtttggactcaaaaggaacacttgaagttggtaaggatgcagatatcaacgtctttgatagcaaccttaacaaattggaaacatatagttacgggaaaaagttttctaaagaagactaatagtcaaacattataggggtacaagaatgaattcaccggtatatattcaaattcataatgaaatcaaaaaggcgattgaagccgggaaatggaaagtgggagagcgaattccagctgaacgtgaactttctacagaatttagtgtaagtcgaatgactcttcgccaagctatttcaactttggttgatgagggaattttggaacgtaaggtgggttcgggaacctatgttgctagtcagaaagttcaagaaaaggtttcaggagttactagttttacggaattaacggaggctcaaggtaaaaagccgtctagtcggacaatttcgtaccatactagtgaaccttctttaagtgaaattgaaaaattacagttaaatgatggcgatctagtattgcggatggagcgtattcgatttgctgacgctgttccaatttgttatgaaacggcaactattccagaaaagctagttagtgattttagtaaatctgaagtgactaaatcactttataaaactctggaagaaaaagcagggttgatgattggacgtgcggaacaaaccgtctcggcgatgttggcttctgaaaaagtgtcagagtatttagatattaaacgtggcgatgcaattctacgtttacatcaattatcgtatgctcaagatggtacaccgtttgaatatgtacgtactcagtatgtaggcgaacgttttgaattttatttaaatcgttaataaaaaagaaggaagaataggctaatcctatttttccttctttttatttgctttaaaggcttccatcataaaaatcggtaatactatttggcgtttgattcgtttagggtcacttaataaacgatataaccactcaacattatgtttttgccaaaattcaggagcccgtttaacagttccggcgtaaacgtcaaagctaccaccgattcccatccagatcgctggtgcaaaatgacgatatttagcaataaattcttcttgttttggaaaacctgtagctacaaaaactatttcaggttgaagttctttaatttcgtcaataatcggaagggagtctttgaaatagccatcgtgataaccaaccaaattaataccaggatgttcatgatgaactttatgaacaacttttttgattacggcaggtttcccacctaagaagtaggctttagaatgatgttcattggcccactgcatgagttcagtaaagacatcatatccagttactcgctctgtcaacggcgttttcgtgaacttggatgctttaacgattccaatcccatcaggaactaaataatcagcagaacgcacaatttttgcgtaattaggatttttgcgagcaaacatgatgatttccggattagcagtgatgataaaacgattttgatgttgaagaagatcttcttcaacttgttttaaaaactgtgatttagtgacattcagaaaattaaatccgagaatattaacaaaattatatttcataagggtctcctagattaaaaattgcgatttaatgtataaatattttagtagctataaatgctattatatcagtatttgcttattgctttggggacatctggggacgcggataatacttctatcgttttatcctgttcacgagtcttctcttccttaagcatatgggcgtaaactttttgagtaatgctagtatttgcgtgaccaagcctagctgtaacgtagttaattgaaacacctttataaagcagataagaggcgtgtgagtgtctaagtccatgaatagttattggttgtaaatctaacttgcttattaatgaatcaagacgattccttactgtttgacgtctacaatcaaaaataaattctgtaccattacttttaccattgctgatgatactagctaactcgttagttatttttatatcacgaacagaatttttatttttaggtttcccaacagtattcatattcccaaagcgagacttattaacatgaatattattaaagggaatagagacatctttatactgtaaggctagcacttctccaattcgcattcctgtttctaatgctacaaggatcgcaaggctagctttatctaatttagagtgatataaataatactgtaatttttcaaattctgtaactgataaagcgttaatttttttgctacgttctataccatgtggtttaagccgtgtgaatatatcgttcaaaatatatttgtcgtaaagcgcatcttttaaagaagctttgactctagatgtaattatagacatagtacctttagaatgtgttttccctatggcgtctagcctagattgtagaagcgagtaagttagatcttcaagaacaactccatcaaacgatttttttacatgattgagtgttaacacataagttctataagttgatggtctaacatcactttttctgtacgtttccatccagaactcaaaccaatcagcaaatgtcattctggacgctattatgctcttattttgaagcttatcggcttccatcataattgcccagtctttggctgctgtctttgtatcaaatgttttagataccttacgtcgtacaccactctgcatgacggatacgacaactctagttcttttacctcttttttcaaatgatgccataatggcgaacctccgttctcttttcggaagtagccctcaatgctaaaatagacaatataaaagaggactacttaatgtagtttttagggttaagtcacatccatcttacttggcggttaggggatgtggcttttttatttggtgttagcagcatcttcggaacgttgccagtctccttcggtaacgttgtctggagcaccgtacatcatgccacctttagcatgagctgccttattctcagcactatttggatcgtccattgccgattgagtagggctgtctgtcccgttatcttgatcttgtccttttacccagtcgtcttcatttccatatacatcactgcctggtgcatggtcttgatcaggcattactttattacccttagggtcgtaaccctgttctctgtttttttctccttgagttttttgttgtgttgcactcatatttttatttttattactaacttcttcattagtgctatcctgagactgtgaattagaatcacttgatttttcatctttttgagacaactgatcactagcttcatttgcataagccttttttaactcttcaactaaatcattagtaaaatgttttgaactaagttcattgtacttgataatgaagttgtctttactcatatctacatcagtatcagcttcatcatgattaccaatttgaactttaacatcttcttttgatacagggactattaattctccacccaataaattaatagattttccaggttctatcttgtcttcgctggatctatcagattcagtgccccaagcattgtaattagctatcgcttggttataagcatcatcatcgtcatcatcaactgaatcgtaatcggcttggtctgcacttaaaatataaacgtcttcacttgatatagactgctcactgtttccgttcttttggaagtatgtatgagtagcttcatcaatatcatctgcagtcagttgttttttagaggtattagtgaatttccattctacggcaaatgccggtttacctttataagaaagttgtttaaatcctaaaatttccatagttcctttatcaggattgacaatcttattttttgcagcataaacttgctgatcgtcattacttgtattatcttcaccagaatcaatcttttttgatatgctttcaactgatgaagagtctttatcggctttgttattattgccacaagctactaaggcaatagatgctaaggcaatagcgcttaaagtataaaattttttcattattcatcctccaaaaatatgtacagcttttaacgtcaatcagtatttggacgtagggttaattaactttgtaaaaatcatatttctacagtatatacaacgacttttccaattatctttacttcattcatatttgaatacaaataatttataggtttaaaacaaggatcgtttgaatcgggtgaaaaagtaacgattccgtttgttttatcattataaaatctcttaacagccatcccagaatcatcttgaaatacgacaatatcgccatcttttaaatcaaaaaagctatcgtatttttttacggcgattaatgagccgtttggaatgatacgattcatggattctccgtttatataactaataaagatatcttgttctccagcatattttcctaaaacaacatcagataatgttatttgttcgatatcatcttttgtgaaaggatcaacttcagttaatattccagccgacaaacctgcatcgaagaagttatatgaatgttttaattcagtttttaaagaattaggagtcataatcttttcattgagtgagttactcattgatatatcttcgaaagtttcatcttcagaaattaacatttgataatcaattccaaagtaatcagctaaaattctcacgtatgataattgaggatcagctccattttcccatcttgaaatcatacttttgcttaattttgtagaatattttttattaatttttttagccaattcatcttggcttaaacctttgagttttctaaggctttttaaacgctgtttaaacatatgacattcctcctcaaggaatatactatcacaaaaattcctaaaaaggaacaaaaagtgttgactatagcaataatgtttcttatactggtgttgttccttaggaggaacgaaaacgagagtaaaaggagttgaaacgaaaaatgactaataaaattgtttatcacgaattgaaaggatggcttgtttcaaatagcatttctcaaaaaagagtaggcgaaattattggaacaacggctaatgtggttaataagaagatcaatggaactggatccgattttaagttatcagaagctcgaactcttcacgataaattaaaggtgcctatggcttatttttttgaaattgaagttcctttatcggaacataaagagacgtgctaataaatttaaaaaggagtgaatatatatgaatgaattacaaaatttcaactttgaaggaaacgaagtacgaactgtattaattaatgacgaaccatattttgttggtaaagatattgcagacgttttgggatattccagaccagacaatgcaattagaaatcatgttgatgtcgatgacaagcttatgcaccaattcagtgcatcaggtcaaagtagaaatatgttagttattaacgaatcagggatgtacagcttagttctttcaagcaaattaccaaatgctaagaagtttaaacactgggtaacaaacgaagttctaccgtcaatccgcaagcatggtgcttatctgacggatgaaaagattgaagaggctttgctgaatcctgacacgattattaatttagcaacacaactaaaagaagaacgtgaaggtagattaattgctgaacaacaagttaaagaattccagcctaaagtttcatattacgacaaagttttatctaacgacgcactaatgactatcagtctaattgctaaggattatggaatgagtggagctggcatgaataaattgcttcatgaattaggtgttcaataccgacaaggtggcacatggttactatatgcaaaatatcaaagaacaggttggacacactcagaaacaaagatggttcctcgtaaagatggtacagaaaaagcagtgcttaatactaaatggacacaaaagggacgtttaggcttgtacgcattattaaaagataacggatatcttccactaattgaaatggaggacgagtcagcggtgtagttaagtcgataacttaatgaataaataacagaaaaggagaactaaatgaataatctaattgaaaacataaattttgaaattgataaatatatagatgaattactttcagataaaacaaaaacctttactcaagttaaaaatgaattagcgcatgaaaggttttcgcatagtattggttttgaagcatttcttcttgaagaattacaaagcaaggtaactgaaagagctctagatcggaaaattagtgattaatctttacgacttacgattaacggaattggaataatgaatttggaatttagaagggagaaagaaaaatatgatcaataaatggacttttaggaatgaagaatggttcataaagagtgtggatgaaattaaaaaaatcctgtctaatagtgatttgacgtatgaacaggctaagtgtgtgcttagtgagacggaacatcaattaactacaagacaggaaaaaatgaaagttaaagattaatcttgatcagaatcagggtaatgacctgcatatagttctaatgcgtgttcataagcttctgaaaatgcttctaatccaagattttggtcgtaaattttaccaccattagattctttagtcatttctttttggatttcaaccatagcttcggcagttgctgcaccaattgccatatcgtgttcacgttttgagtattgcattattatcaccacctttctattaaaaataattatacacacgaaagaagggagcaagaatggaaaatatatttcactggataataaaaaatcccgatgggactgtagccctcggaatccaaataatatctttgattatatgtgtgccactgcttgtatatatctattttaaaaaatagatatcagtctaaatgtttcaaaatagcatgtgtagcttgacgaatcacttttccatcaggactttctttattatcgcccacatctttcggataactgtcttttacccaatgaaaatcagtaatatcaaaattaagtgggaatgtttgttcaaaaactcgtgcgtttaaatctcgatagataatagttgcttccagtgaatcgttgtaagagttatcgaaaaatgacattactttttgatttggagcaagcgtagttccaactatacttgataatttggttacttcgttgccagcatctaaaggcttgctaaaagttagagaagttattgtagcgggggaattaccaaaattcttaattgataagtatttagaagcggtaaccgtatcaacaaattgaacataaacatcgatgaaaggttctgatgcagtacgttgaattttataagtttgcattatcccaaatgttgaaattataagtgcgattacagaagctatcgcttgtatccaatcagttaattgcattttatctcaccaccttttattgaactaactaaattatacacaagaaatagggaaaataatatgaacaaattagtaattatgaaagaccaacaagcagtgacgactagcttacaagtagcagacggacaaacaacgttaggagcatataaatgacagtaaacaaaaacagaatgtccgatgacaagtatccaatgctaatggacaaaaaaacagtagcagagtatttaggagtttctaaaagttcagttgatgtttttcttttaaacaacaacttgagtgcagcagcttttgaacctagcaagcttaagcgaaacttttttatcaaaacgaaagttaataaatggttggaggaattgtaatgatagtaacagtaagcctagggcaattagcgttttatttaatttcagtagtagtggcaggattaattggtcactcgatgaaaggtggtgagaagtaatgaagttagtaaaaattgaggattgttacgttaatacagatcacattgatcttgttagagaagcagaggatggttttggaaccaaaatttttatgagcggttctagtataccttgggaagctaatttaccaattaaaaaagtactcgacgctatttgcggtagcgaggagcactcggttgaatacgaagatgctgaaagctatagacgagataataattataacatcatcattgataacgacaatggttgggaaagagtgttcggaactaggtcaaaagtattaagtttactaaatcaattaaaaaataatgaaacattaacaataaaacggacaaaataaaaagcctgctactggtatagcagactcaaataaatattcaacaaaggaagtataacacaaatgaatcaacaacagttcgaacaatatgaacgtgaatacgaacaagaacgagagcgtaaggaaattgaagccttattcgggaaggacgaacacaaatgaataatattgatgaacttgaagtggaacgtactaagttagatcggaagttacgtggacttaagaacaagaaagcagaaattgttctatctattgaagaagttcaagacgagattaataaaatcagtcagaaagaacttcaaatgttcgacgggagagagtgccaaacagaatcattcaagtatgtacgaacagctagtaatcctagcaagcctagttggtggcaagtagttaagactgacaatgctaagccaaaagaagtggttcaagtattagctgatatcgatgtgaacctgatcaagcgtgaaccagatgtttcagcgattaaacgttatgtcgcagaaggtcgcttcattgttcgtgaaggtggtcagttaatcgacactgaaacaggaatggtactaccttacagagctaaacgtaaggcagataagttaacagttaaggcggtagaaaactaatgataactaaaagtgcaatgagttttagaaaaaacaaagactggaaaatgattctttacgcaaaggccggtcaaggtaaaacaacatcaattaagtatctaaaaggtaaaacactggtgcttgatttagataattctttcaaagttttggaaggagtttctgacaacattcagcaataccgctttgacaatggaacgccagaaggacgtgagtttgaccgaactaagccgattgaagatttaaatactttcttatcagatgaagatgtattaaaagctggagaaacgtttgacaatttagtgattgataatgtttcatcgcttgaaaaagattggtttgtggagcgtggcaagaattcaaagaatggtatcagcaatgaaattcaagactactcgcaatggacaaattacttttcaaggattatcacaacaatctatatgattccaaatttaaacattttgattaccgcttgggagaagaagatcgacaacgaaacagagagtgggcaaacatttagccagtatgctccagatatccgtgataagtcgctcaatggatttttagggttagctgatgtagttgctaggttagttgttaatcctaagacaaacggacgtggcgcaatcctagaaggcgataacacagtctatgctaagaatcgcttagatgaacggacagtagcaccaattgaagagctatttaactttgacaataacaagacagaaaaaccaaaaaccaaacaagaaaaggaaggtactaaataatggcaggattcgatttagatttttcagaaattaaagatatgaatgtaactgatggcaagtatgaagcagtgattaatagtgtagcagaagatgcaactaagggtggaactcaattcattaatcttgatctaattatccgtaacgatttgaaaggtcaaaaatttggtaatgcacacatcttcactcgtatttttaaatctaagaaaacaaacaaatatccaattggaatgattatgacagttgccaaagcagctggtatgaaagataaaagccactttgattcattggaagactactttcaaaaattatggcatcgtccagtactagtaacagttaagaacgaagaatcagaatacaacggtaaaaaatacgaaaacttaaatgttaaacgttgggaaacttctaagttcccagaagtccaacataagtttaaagaatcaaataaagaaacaggttcaactgatccattcgctaacggtggccaatcaattgatatttcagatgatgatttaccattctaaattctaggagttgagttaaatggcggaagaaggatggatcaaactgtatcgttctatccgctcaaactggctttgggaagatggaaacgaacgatatttaaagtggtggattgatatcctgctaatggtcaatcaccagccaaggaaagttcttgttaatggtgaatttgttgaaattaagacaggtgaacgtttgacgtcaacggtaaagctttctaagcggtggggagttagtagaaatacggtcacaaaattcttaaaacttttagaaaaagatgaaatgattttggcttcaaaaagtcgtcaaaatgggacaacgcttaaagtcctacattacgccgattatcaaggttttgaagataaaaaaagacatcaaactgaacaacgaactgaacaacgaactgaacataaacaagaattaaaagaattaaagaataaagaccatgagaattttgagaagctttggaaattatatccgaaaaaagaaggcaataaaaagagagctgaaaaagcatatcttgaagccaccaaaaatggagtaactaacaaagaaattcaaacagggattgttaactatattaaaaaaattcaagtggaaggtatcgaacgtaaatatattgctcaaggtgctacttggttctttcaaaatagatggactgatgaatatgaacttgatccaattagtaagactactagtgatggtcaacgtgcaggtaagaccgcagaagagattactaacaaagaacaggaacacttaaaagaaatcgaacgaagagcacaggaggcaaaggcaaacaatgaacacagagattgaacgtgaagtgattggaatcttcctgaaccacccagaaaaaacggaaacctcggttgtagaacaagattggttcgtagaaccagaatatcagcatctgttcgaagccgtccgccaaattgaaagcaacgactttctagatatctacggtaaatataatcagttatctagaaatccttttgatttttcatcagttaaacgaatcttgaacgaagcaccaccactaagccaacttagcaacgacgttcaattgatgaaaaaaacggttcatattcgtgaagttaacgaagctgttaaagattaccagcggaacccttttcgtgagaatgagcaaaaactattagaggctttatcaaaaaatgaaacagacgatgttagtgacgatggaaaacttgatgaagctattgctgaattaaaagattcgatgaatcactctagaccacgtggagttaaaacgttcaataagttagatttcattctaggtggaggcatgtatggatcaatgttgttcacaattggtgctagaccttctacaggcaaaacggcgttctctgtaaacctagcttatgaagcgatgatgaatgataaagaagttgaggtagatttcttcacgttggaaatgaacaagcaagagatgctgaatagattcatctcaaggttcactggagtatctagcagtactttacgttctaaagctaatgaaatgtcatcaattctaaaaggattaatcaatcaatcagctgagcagatagctcaatctaaattaagagtgtatgacggattggaaacattaggtgagattgtccgaatgattagaaagaacgccagtaagactaaacaaggtaagtatttagccatcattgactacattggattggtcaaagtaccaaatgtgaaggatagatatatcgaagttggtgaggtaacacgagaactcaaacgattaaccaacgagttcaacattccgattgtggcattgtctcaactgtcacgtggaattgaaaaccggcaggacaaaactccattactttctgatttacgtgagtcgggttcaattgaacaagattccaatgtagtggcattcttacacagaccagaaaaagtagatagcgacagagtagtgcagttatcaattagaaagaatcgtgaaggcgagctagcagatattaactttacttttattggagaagaaatgacgtttaaggaggtttagcaaagtggcatatatggattactgcgagtatcaagccattatgaaagaaaacggatatgttgaatcagaagctgtgaagatatttttaaaacgagcagctgcattcaacaaacgtaaaaaaatatttatgaaacaagaacagttcgatcgcaataatggtgtactgcttgagtacatccataaaactgaactgcagagacagaaagcagtttgggatgctatcgattgtgccgagattgaaaaacgtcaaggattctactttattgaacaaagtggcggagatgaatttatggctgtgatgataactcaatatgagggcgatttaagccgtatgacggcaattgagaaagcgacatataaatactttgaattaatagacgagatgcgtaagcgagcgaatagggggcaattagcgaattgattagactaacaataccaggtgaaccagtgccagctagcagaccacgagttacaagacgtggatttgcatttacagctgaaccatatagaagctacaaaaaaatggctcatcaggcaatcaaagaactgtattcaacagaaccactgcaaggagcactgcatgtacaaattaaattttatcgttcagttcaaaaaagtgtttcaaaagtggaacgccgtagaaggctctcaggagtccatagaccgacgatgaaacctgatatagataatctatttaaggcagtgacagatgcttgtacaggaatcgtatggaaggatgacaaccagattgtaagtactaagtccgacaaattctattcagaagaaccacgggtagaaatttacgtggaggagctatgaattttaaaaatttaactagtgatgaacgtattgtagctaattttattaacgaagctttcgaagagcgtaaccaaaacatgataagcactgttgtttggattaataaccatactaactatctagttaatcagcgtccagacgtacacagagcgatgaacaatttaacaaataggcaatttaaccatgtgatttcagaaatattactaccattttaaaattatgccgtctcaaacggtattaagtacagaatcagaagaaactgacatttaaacataaatatccaatcaagattgaggttaataatcgcatgaaaaaactttcagaaatgacaacagaggatatcatccgtgaattgtatggcaatgattacactttgcaagaattagatcggattaaagaagcacttgaagaacagtatcaagaatggcgtaaacgtaattttaactaggaggaacgaaaagaatgtacgtaattaagaatacagccaacggaagatattaccgaaagctaggagcggaagcacatcagtacaccgatattagatatgctactcctttcagcaagtggaaaaaggcaaaacaaaaagcaaatattttacatgctgcgattagtccaattggtgaacaaattaattttgaggtcaagcagcataagttttacgtgttaaagaatcgaaatgataaaggctacatgaatcaagtgtcatggaatgcaccgaaagaggaagcccgtttgtttgatagtgaagaagacgctacgcgtgaagcaattaatttagctactgctatggcaagagttggtgtcgaacttagttttaaagtagaagaactataatacagcgtcaaaaaaactgaaaccgtgggaaaaacaacggttgtataaaatctacactttattaaggagaagctatgaatattcatttaagaaattttttaatttgtgcattagtttatattactatgacaattctttttaagtggggatatggagaaataagttcgttcccacaatgggttgtttatactatttcatatataggaacgagtgtaggagttagccttactaccgatatatttagtggaagatattagaaagaaagcgggtatcaacgatgtttagattaattggcaatgtgtctaagaaagtatatcacgaagcggaaaatgcttctgatttgaataagtggcgattagataacttcattgaagaccgctacaaaaaaggtggggcagtaagttcgtacgaagctccagaagcaatggtgattgtgaaagctaattctgttaaatcacgaaaagaatacttgaatgatttattggatgaaggaaagtttgaagaatatcgcaaaataaccatgggaaattccgatcgtaatattgaagtgtatggaagtggtaaagatgtaccagaacttattaatcgtcgcaaaaaggttgagaagctattcagacaaggaattacaaataccgctgaaattgcaagtgaggtgcaagcttcaagaagtacggtgaattttgaccttagggcattacgtaagacttatcccgaactaaaacaaaaaagagctagatcataggattacatattaggaggaacgataatgaataatcaagtaacaattttatcgccagaacaaatggcattgaaaattgaaaagtacatgaaagagaatgctgatgaaatcaatgtaatgattgataaaaaaatcaaagcatccatcaaccgagctatcaaggacgcattccaaactacagacagatacggtcgtcaaggtggtatagcagaggaatcgattaaaaaaattattaccgcagaaattgaaaaggcaacaagcgcaatcgtgattgatcaagacgaactggtcgaacagattaaccgtaagctccagaaaaaacttagtaatgtttcggtaaaggtgaacgtttcgttataggaggaaatctaatgattgcaattatcaacgaggattatcaagttaaaatagaggtagaagattgatggacaaaaataagtgtaaatattgttgtgaaccttttaatgatattacgaaaaatatatacagcggatatggagacaaagtggtagctaaaggaattatcgtttcgggctacgatatcaaacacagaaatgttaaatattgtccaatgtgtgggcgaaaattggaggcagaagatgattaaaaaggtattaaaggagatatgggatatcaggtgggtaattatcacgctatttatgatgatttcatttatcacctccacaatacaagattttattagtaaagattatgattctggttttaataatttaatgattgttttgctgattattgatgtacttttgttgatgtggtctcgtgcagatgcagaaaaattaatcggtatccaggatgaaataattaattcacaagacaagataatcaaacaaaacgaaaaatcaattgcactacaaggtgatttaatcgctaagcaatctaaatggattaaccaagttactaaaattgtaaaagaaagcacgcaaaaggataaaactaactaagaatcagcagaaaaattggaggacaaacaatgctaaaagaataccgtaaaatagcaacgattaaagcagaacagtttgatggctcggaagaaatttggagacctgttgcacaatttgaaacagaatacggagttagtagctttggacgtgtgcgaagcttagaacactttgaccagtccggcagattccataaagggaaaattctcaaaccaaaattgaatggaagagggtatttgcaagttaatctttgtgatagtggacggtcgatttacccgtcaatacatcaactagttgcaattgcgtttatctcaaacccctttaattattcagaagttaaccacaaggacgaaaataaattaaataatcatgttgaaaaccttgaatggtgttcacaccaatataacgctaattatgggacaaggaatcgtcgcatttcgagcactcttaataaacctattgccgcttttaagaatggcaagctgattaaggcattcgattctgcaaagaaagctgcagaatggtgtggtgtggaaaacagcacccacattggcgaaagtgctaagaatcaaagaaaaagtgcgtatggatatgaatggaaatatattgaggattcattgctaagaaaaagcacgcagaaagttggaatagacaagcactgggctattgcagatgaaattttcaggaagacttatgaagaggtgaaatagatggtagtttatgtactttggtggcaaaaatacgattctgttgaaatttggggcgtttattcaagcgttgaagaagctaagaaacatataccagatgatgatgttgaaaattatgagtacgagggattcagcattgaagaatttgatttagatgactttgctagttaagaggcgaaatcatggtaaagacaaaacatataatttagggaatacaacgttcacggggaggattaactaatggaaaacgtttatgttgttagattaggaaatttatatttaaaagagtcatcagaattcatgtcacaaatgttttatacattggtaaatttcgtaagtggtgcagagttttacgatgaagatgaagcaaaagaattagcgaaacaaatcggtggcgaagcttataaaattaatctagaagaggtggaataaatgctatgtcaaaagttaagaagagagttagaccaacaaaagaacaagcccaagaacttaatcgtcggctagatgccgttgtgaaggcaggacatattaatgatttgtattgcgattgtgaagtttgccgagcactggcagaacaagcggagctgatgggatataggacagattcgatcatcaaacagcctagtgataagtgggaaagacgtagacgagaagcaaaaagaaaacgtcaaattgatgtggtcaaggtggctaatctagcaggtcaagggttaacatctgctgagatgagtgaaaagatgcatcgcagtaaaagttatattaataagctggcgaaaaaatttgaaattacgcttgctacgaaaaagagaggtaggaaaccgtgccattaataccagaacttgacgagaaaaagactatcaagaatgtgaaacacttttttgaagtagagttcccagcgattcagaatatggcacatgtagcttatgttgatatgaaatcgccagtaattagtggtatgccatcagtacatggagtagacaatagcaatgaagagaagctcacagcacatgctcaagctaaggacttactagctaaggtattgcagtcatgttcaggactagatagagaacatcgacacgtgttggaactacgctacttcaaaaagctaagctgggcagcgattgaagacttaactggttacaataacacacacaactgggaacgattcaatgaagctttattacaattttcgtgggcatttgcggacgttgaagacttaagagtgtttaaagataaccagataaacgaataaaatcggaatgaaatgctaatagtgttcgccttatattgttaatatcgaaagaattgataagtagacacaacatataaaactaataaacgaactattattgatcatttcttttgattgggtgaaatttgggtagtttcaaaagagactaacggttttaagctagcaattcttttcggcaaaaaataataaggaatctttgtgcttagtaaggttcgactccttacagtcttattactggtatgtttgacgtagttggtagctacggataagcaagcacaaaagagtatggcggagatacataaaggccatcataagtcctactcggacaccatcggggacaactaccagatgagatgtggcggaataggtagacgctaattaattcttcagttgccttgtcttggagagaagatagacagtcagttagactatacactaccgtgtgaagggacggctgtcatgtaaggtgcaaatccttaccatctcatagttataacactaaggtcacataacttaattgtagtgtggctttttattttggaggtaattaattatgaaacgaagaatagtacgaggccttaattactttaatgtacgtcctccagtaatagtgtatggctgtggtgaacccacaacgtttgtaggccggaacgacaatagaattatacctaattacagaactgctaaagcatatttatttaaacgtggaggtaaatagataatgaaaattaatacggataaattagcatttaaggtttcgcttgatacagatgatatcgacaaaatcatagatagatatgaacaagataatgctttattgattgtagaaaaaggcagtgcaccttggttatttgtagatggtgagaattatccggttacgtatttatcgtatcaatacttaactgatactgacaaacaaggtgtcaatatagttgttgctgaatatatagatggtacaactgttaagagtattgagttcgataataatacaggtgaagtaaccgaagctaataaataccacttaggcgagtattaacatggcaggaattaaaatgcatcattgctatcatgtcggttgtcatgagttattgccgtttgaagtaaagtattgcaggaagcatacgattaacaagataaggacaccagaagatagcaagcgagataagttttacaaccaatataaacgagataaagaagccaataacttctatcattctaagcgatggactgatacgcgtaactatatagttgctagagacatgtatgtatctggagttagtgcagggatattaaatgataaggatatcattgtagatcatatcattcctttgaggttactcaatggtgatgatagatatgagatgagtaatctatggttgttatctcgtaaggaacataacatcaagactaagttagaacagagtatgaaacctaatcagttaagacatgttagtaaggactggtggattaaagtaattaaggagaagctatgaactcagaagaagcattgacgttggcaaaggacaagtcgagtaagactgcagaaaagtttattgagattgttaatcaagatatcgaagaagcttctaattcaggagtaaccaggattagagaacatgagattcaaggatcaatgctaattggattaatagactatcttgttagtaatggatttaacgttgattatgaagaggacggagacttgaatactgggattgttagttatccaacttactcgttaacaattgattggtcgaatattatagatgatggtgaagattaaaaatgaaaaattaaattccaaaaataaatccaaaaaaattttaaaaaaataaaaatcaaaaaataaaatttcaaaaaaggtcaacaaacccccgccccataggctttctggtaaagagcgaaacgcaatagtggtctctcactatatgctacttttaaaatttttaggatagggggggtacccagtggaaaggagttgatattcgttggctaagaaaccgtataaagaccagaatgacgggcatttgtctagtgatccaccaaagtatctaggaactgaagcaaaggccgtatggcgcaaagtcgtgccttttttagaaagtgaagggaaagtccaacggatggacacttctctggtagaattttacgccacacaatatgaaatttatcgaaaggcatatgatcacatccaaaaaaacggtgaggtcacgcccatttataaatcattacaaaatgcagaaggcaaaattatcggtaaagactttgtgggctggaaaaagaatccaatggtacaaatatatgattcagcgcttaaaagcttaataaagactggttcagagttaggattatcaccaaaaagccgttcagatttaatgcaactaatacagccgaagcagaaagataagaagtcacttgctgagaagcttagagagggagctggtgacttctaatgatcgataaggtagatttgtccaaaggagaggctagcgtctccgaggcagttaaaaagatagattttacagctatattagagaagtaccgtgacccggcaactgtttatgcttggttagtcgttaatgacaagattgtttctggtgagatgatgaagctagcttgctttagacatctacaggacttaagaagagccgaagacccagacgaagacttcccttatcgctacgatttaggacggtgtcgtagtattttagggttcgcttctatcttccctgaaccagcacacggtaagcccatgccactaatgttatggcagaaagccattttgtgtatgagtaaagcttgggtatacaaggataacgacaacttccgttatactcgtgtgatcgtatcagttgcacgtgctaacggtaaatcttatatcgccagcattatgttgtggtacacctacttaatcgaatgttccggactatctaatcaagatataggttatacaatgcctactggtgcacagatgaaaaagccgtgggcttatgtgctaacgtctggaagaattctaaaagataccgaagaagacatacaagaaattttaaacaataccgatacttatattggcgaacagggtattaaatctgcgattggtaacaaagttgttcagctatctaatgagtctggtcaatttgatagttaccattttcgcttggcggttgttgatgaagcaggagatggaggttacgctcacaaacctaacatcggtaaaataactcaaggacaatctcacttacctaacgctcaattattaatgatatctacttcttatgagaacacagaaacgttgttctataaagatcagatacgtttgaaagacgttatgaagaaagactattcccgtgatgaagacagttatttatgtctggtatggcagcaagataacctagatgaaattaatcaacctgaaacttgggttaagagcaatccattgctagaactagatgaagacggtgctatcctaaaacgcatgattagtgataaagatgctcacatagcttctggaattgctaatgagtttcaaaatcgtaacttaaacaactggttgcaggttaaagcaaattcgtatgtaagccttgaagatttagagaaagcaatcattcctagtttcggtattgacaatcgacaggtctacatcggatacgataaaggacaattcagtgatgataacgcaatcgcttttgtatatccttatgaagataacggagtaggtaagttccatgtcgagcaattctcgtttattccgcttaggaattctaacaatgatatcaatgttaaagaacatcaagatggaattaattatcgtgcagaagttgaaaaaggattcggaaagattactgaaaatcaatacggaatcgttgaagatgatgaagtatgcaattggttactgaactacgtagatgagcaccatttacaagttaaggctttcttatatgatttctaccatgaaacgtcaatgactaagaggcttattgaaaatactgaatgggtttgtattccagtccatcaaggagtaagaagccttaacgagccaactcggtttttccgtgacgaattacatcaagggcgtattacaatgctggacgacggaattttgcagtattcacttaagaacgccttactgttcgaagaaaataatggtatcaagattaataaagacaagcgtactagcaagattgatgcagtggacgccttaattgacgctttttttgaagcgatgtattactttgaaggattaagtaacattaaaactaagtccatttgggacaataaaacaacagatgaaattaacgattacttcatgaacgactttagtttttaggaggtggacaattgaaacgaattagatggttcggacaattaatactagcaaacatcagtttaatattaatgattatggctctgactacgtttactgtagcagggtttttattttgcaaatatgttggattggtagtcctaggcttatctctaatctaccttagttggattacagcaagcaggaagggaggtgagtaatatatggcaattaatccatttcctcgtttaaacactcgctcacaaagcttaccaagcggttatatgccgtttacagttacgggcaatgcaattatacctgaaccagttgtgaacgctgatacggctattaataactctgatatcttttcagttatcagtttaattagttctcaattagcgagcattaattatgtgatggacgagccttttaaaggtgtttttaaccatccgaatggcaaaattaatccttatggtttttggacgtcagttattaatcaaatgctgcttactggtaacgcatatgtagcaattcgtagaaaaaaagggataccagtggaacttgaagaaattccatacgcaaacgttcaagttattcttggcgataacaatggtgatttaacctatcaggtatcttacaacgatgaacgtagcagtgaagttattaaatccgatgatatgttacattttcgtatctttgttactggtaattcactttatcaatacgttggaacatcaccactacaggcactaattaacgaactatcttttcaatctctatctagtagattatcacttaatacgctcaaaaacttcattgcacctagcttagctatttcagtacccgaagctcaattgagtaaagaatctaaagaaactattagagacagctttcaagaacagtattctggagcaaaccaaggtaagccagttgtattagatcaatcagctaccgttgaagctatgccaacgattgacgctaagacagctgaatacctgaacaatgtagattggactagagcgcaagttagtaaagtgtttggtattccagacaactatttaaacggtcaaggtgatcaacaaagttcattagatcagtctacaagcatgtttattagtagctttaatcgctacattaaaccgtttgtaagcgagttagaacagaagtttaaggttcctgttaaagcagacctagaccctattgtagacccaacaggttctaaatatgccaatatgatagctaagtttgcaagtggaaaagctcctgttttgagtggtgaacaagtaattaaccttcttcaacgaaagggggtgatagatgatgacttcgaaaaatgatgttcgaagtgttttaaataaagattggcacttacgggacttaagcaatgatgatagtacatctgctattggacaggttactggttacgcttgtgtgtttaatcaaccaagcgaagacatgggatttattgaatattgtgatcccaacatgcttgatggcgttgatatgagtaatgtattagctctatatagtcacgatttatccaatgttttaggtagagtatcggctgatactttagttttaaaggttgatgattacggtcttaaatttacgctgaatattccagacacaactctgggaagagatgtttacactaatatcaaaaatggcaatttagaaggttgctcttttggatttacgattgaagatgattcatggagtagagatacaaatggtcaattagttcatacaatcttacaaattggagagttaaccgagataagcattacaccattacccgcttacacagagactagcgttgctgttagtcgtggattaaagaaagttaatgaagagacacgtcgagaaaaggcgcgtctctttttagatttaacagaaatggaggttttttaatttgaataaagaaaaattagaacagcaattacgggataagacagggcaacttaaaagtttgatctctgaaactagagatttattgggtgccgaagatagttctacagaaaatattgaaaacaaaatgaatgaggtaagaaatctaaagaaggatattgaaggacttaatgttaagctccgtgctttgaatgatttagatgaagatgaacctaagagtgactctgaggggaaaccaaaaggcaaaacggataaaccagcggataaacccaaaagtgagcctgaaaatcccaagcaagacccagaaaaaagggatgaagaaattgatgataactcagacgatgactatgtcgctgaggatgaacttaatgcaaaaaagcaaaatgaagaaaaaggtggtaaaacaatggctacaaacttaactgcaaagcaaaaagaagaaaagaaggaaaaccgtacacgttcaattgaaagctacatccgttctcacggtactgtccgagacactggtttagttactggcgatattggaccaatgattccagaagaaatcatctacaatccagaagcagaagttaactcggttgctgacctatcagcactggtaactaagactcccgctactactgcctctggtacttacccaatcttgaaacgtgctactgctgtaatgaattcagtagcagaactggaagaaaatccagccttagctaaaccagaattcgaaaatgttacttggaaaattgctacttatcgtggagctattccaatttcagaagaatcaattcaagatacgcaagttcctttaatgccagttattcaaaagaacgctagtgaacaacgtttaaatactcttaataaggctatcagtgctaagttagttacgtttaacgctaaagcttcaaccgctgacacagtagcagatgacttaaaacacgttcttaatgttgatttagaccctgcttacgataaatctattgtcgtttcacaatcagcataccaagttctagatacattgaaggataaagaaggacgctacttactacaagaaagcattacagcagcttctggtttaactttatttggtaaatcagtagttgtagttaatgacgaattactaggtaaagttggagaagctcatatctgggttggtgatttaaagcgtgcaattctttatgttaaccgtgtggatacacaaattagctgggttaagaatgaaatttacggtcaatatctcggactagcaatgcgctttgatgtcgaagttgcggataaatcagctggatactttgttacagttggcgctggtacaccgtcaaaatagacgcccctagtggggctaacgtcgtccctactgaaacaggggctttactaagcgcagattaataaaggagatggcttaaataatggcagatagaagtaaacaatcgctagtggtttacgataagtccggtgctaaggttgccactggtggcgttggtaccaaacaagtagaaatcacgggtttagaaggtggtaagcaagttgctaaaggtgattatcaacttgcttacacagatggaacaaatgcgtccgacaaagtggacgttccagcatttacagtattaactggtactgttacaactggataaaggaggcgattttaaatggcggttacagcttccgagttgatggacgaactccatattgatacggacgatgtagaaactaaaacagttcaaggtttaattgattatgcaaaagagattgtaaccgacagtgtaaccgatgatctaacaactgaacaacttgaaacgaagtatccaaaattgtttgacttagctaccaaaaacctagctacgtcgatgtattacgaccgtgagttgactaatggaacgtctaaagggtatcaaatggtaattatccatctatcagctaaagttgctatagacatgaagaagggcagtgatgatgatggcaacaatgaaacttaaaccatctgattttaaccgtaaaattacttttggaaaaacaaaagatgaattagacgaatctggtaacttttatgttccgacacttatacccaaattaagtctgtggtgtgctccgcgaactagaacacttaaccagcaatatcaaattatgaagacggaactagaagatactattatcgtagttattcgtcataatcctaaggttaatgaaacttacgaggctaaatatcgtgatgaactttatgatattgtctcaattagtacagatgatactaaccaaacgtttgcctatgacttcattactcttaagaaagttaaaaaggcaggtgcttaacatcaattacgttgattttatggaacaatggcttaagcaggttaaaaaggtatcgacaagcatgtctaccaatgataaagctaagataactaaagctggtgctaaggtttttaagaaagaattagaacgtgagacacgtaagaaacactattctgggcatgatgataaagttttcggacacatggcagattcagttgtgatgaaaggaaccaatattgacaacatcaaagatgggactagtattgttgggttcgatcactaccatgctagcaatgctaggcggttaaatgatggcactaagtattacgttggtgaccatttcatcacgaaccttagagaacgagtaatgccgaaggttctagaggctgaaaagaaagagtatcagaagattattaataagcacggggaggtttagtgatggataatcccgtactagaggttaagaatatccttgaacaagctaactatgattggctctctgaatgctatgttaattatttaccaaagagtgctcaagatgataccagcagaaccattgccctggtcacttcaatcagagaagaaccaattcaatacggtaataacgtgtttaatggaattgagaatgctgttcaggtacaaatattcttcaagtatcaatttaaagattcaattcaaaagaacgacattaaaattatgcaactgtttttaaagaacggttggaaaatagatgattcaaaaccaatttatgcagaccctgacactaaacaactagtcaaggtcttttattttactcaaaaaaattatataggaggtagttattaatggctacagtaggtttaaagctagtaacactagcactcaaagactctgaaacagggaaaattcttacaggagaaaatggtttatcagaaaacggattgctaccagttacaacacaaatgtggggtactaaaacagctaatattacgaatattcaatcaaccggaactattaattacggtaataacgcagctgtattcgtttcaacacctaagggagcgccacaagtagcgctagacttcaacaaattaccatttgaagtcacacaaaagattgttggacgtaagcaagacccagatacaggagcttggattgaatctggtaagcatccgtcagttgcaatgcttattgaaagcgaatctattgaccgcatgaacaaagtttattacggattcggtaacggatcaatgacacaagcttcaattaataacggaactgatactaacgctgaaacgatggcaactgatgccttaacttatcaagcattgtctacaccagaatttgatggtgaaatgcttgctatgtattccgatgtttcaacagcattcgatgaaactaagatgaagaaacaagtgtttgcaggctacgtagactcattgtcaaaatagacgccccgacaggggtaaacataacccctgaagtaaacggggcactattaaaagctgaataaataactataactcgcctaagaaagtaaacaataccgtaaggggcgggtttttaatttaaggagaaagcaaagctatgaaaattgtaaacatcaaaattaaagaattaggcatgaagaaggctgttaaagttgctcaaagtgtagcaaatacaaaattgattaactcaattcaattgactttgctcaaattgcaagatgatcactcagacgatatgactgaaattgaacaacttgaacatgaggcacaattattgagtgaaattgaacatttcttcaaaaacttcttaaagctaagtgataaacagattgaaaaggcagaagaagagctagacccagaggaattatcgtttgcaattggtgaagctactgcgcgtttccaaggtgctactgacaaagatattcaaaaactccgtgaaggtatgaaggcagaacaaaaagatttagaagaccctttagtagaagagaacgactccgacaaatccgaatagagatttttaaaaaagaacgttccattgataatatgaattacttttataaaaaaatgctgatggagtatcatctattgccaaaagatatagacggacaagattattttgagtttttagaagtaataaatgctaaagcaccagaggatcaaatggtggattcaatggagatctataaacaaaattcttaaagaaaggaggataaaaatatatggcaagcaaagttgattcaattatgagtacctccgttgccttagaaactcttaaggcttctaacagtattaactctttgaccaaagctgttagaggctctacatcggcttggaaggctcaagaagcccaactaaaatctagtggcgattatctgaaagctagtgaagccaagtacgaaggtcttggaaaatctatagaagctgaacgaaagcgtatagaagttctccaagagaagatgaaagacttagatcagaccactcaagatggcgctaaacaggctgtaaaatacggtactgacttagataaagctaccactgccttaaagtccatggaagcacaacaacaacgcgcttatgaagctttgaaacgtgaagaaagtggcataaacagccttaattcatctatgcgtcaacgtaactcgttatcaaaagctatatcggatcgtttagaagccgaaggtaaacatgaacaagctcttaaggagaaacgagacaacgctcgtaagtctattgatgatactagtaaagctctaaaaaaagaagagttcttacttaaagacttggaaaaaaataatggtagtgcaagtgctatcaacaaacagagaatagctgtagaaaagcttaaagcttctatggcagaatctaaatcttctgtttctaagtttgataaatcaatcaaagagttaaacccatctcctattcaacggttaagtagatcgtttagtggattaaaaaaggaaggcaaagaaacacactcaatctttaaaagtgtgttcgctgccagcattattagtagcgcttttactagtacactaggcgcaatctcaatgaaactacatgatatgtggtctaagtctatggattatgctaaagcacagcaaaccatgaatgcttcttggttgaccttgacggggaatgctaaagaaggtcaaaaaatggttaacatgactaatgacatggcggcttcttttgctaactcaactgacatggttaatgacttaaaccagaagttttactcaattagtgattccagtaagacaaccaagcagttgactactgacgttctaactcttcaagatgcttttggtaaaactgatgatgaagttaaaaacttctctacgcagtattcccagatgatggctaatggcaaagttagtgctcaagatatgatgtcgtttgttaacgtctttcctaagattagaaacgagttactaaaaaccgaacagaagatttctggcaaccataatctatccatgaaacagcttaatgatatgatctcaaatggaaaagtatcatcgaaaactatgcaaaaagtcatggatagtatgcagaagaaatattctggtgcgactgctaactttggtaagacatttgacgggatgaacagaacagttaacgcacgtgttccagcattattaagcgcgtttacaacgccacttcttaaggcaaaaaacccattacttggtacagtttcgaagtgggtttctgataagaatacagaaaaacaattttctaaattgggtggtgttgcatctagagggtttggcacaattactaacgccttttcgaaagcattaaatttcaaaggcggattgaattccgacaagatttttaaatcaatttcaaatacgattactagcttagctaacacgattgctaaacattctaaacaaattgttggcttctttaaaggcttatggaatggagtaaaaatcctgggtagtatagggacaggtttctttaaaggattaattggtggtttaagtgcagttgtcaatcctttagcaaaaatggctggacatagcaaaaaagttaaaggattatctggttcgttaggtgaactatctaaacataaacaaggactagaaacactcggcaaaattttggcgggtgtttttattaccactaaaattgcgaaaacagtagttggttttgcaaaacttacgtcatcaatagctaaagtgataaagtcttctaaattattaacggtcgctcaatgggctttagatgctgcaatggatgctaatccaatcggtattgctgtagttgctattggtgcgttagctgtaggcttttatgaagcatacaagcatattaagcctttcagagatgcagttaatggagttggaaaagctattgctagcttcactaagagtgctctaaaagatactaagaaattctttaaagactttggtaaaaattggaacaagttctggggcggtattggttcaagcattggtaaagcttggaaaggtgcaagcaaggcggtatcaaatggagcttcttcattgaaaaaggcctttagtgaaaaagttggtgatattgccgactggtttggggatgtcggtaaaggcatttctaagtggtggaaaggtttttcgaaagcctttaaaaaaggatatgattcttttataaagaaagctaaaggttttttcaaaggactgggtaaagtcttaatttatgcacttgcattcccagttggtctagcaatgattatctttggaccacttgtaaaagcaattggtcaaggaattaaactgttaatcaagcctatcaaagcaatgggtaagatgatttctaaggcgttctctgcaatgtggaagcctattaccaaatacgctcaaaaagcgttcaccttaattaagaatgtcgttcgtacaggacttaacaacttagttggtaacttcaaagcatacggtgcaaccttgtataaggtttggaaagcagtttggaagccactatctaaattcctttccaaaaccctaaattccatgggcaagttgtggaagaaatttactaacatcctttccaaggtttggaactcatttagtaaggcttttaaaaaagcttggaacaaagtttgggatactattagtgatttattttctgatatattcaataagatttctaagaagttcaaatcttggactactgcaatatctaaaacatggactggtttcaagagctggttcagtaaaaagtggaaaagtatgtggaatggtgttcatgatttcttccacggaataactaaaaaattaagcaagacttttagtggatggacttctggagctatgaacactctaggaagttttggtaataaatttaaatctggttggaacggaattgttaaaggcgttaagaatatcttcagtggtttgtgggatgaaatgaaaaagatggcttccgatggtcttaatgctgttattggagttatcaacaaaggtgtaggtggcattaatacggtcatccatacctttggcggtaagaaacaaactattaaaccaattggcgaggtccactttgcaactggtactggttcattaggttctacaagctttagacgtgcgattaaccagattacaccagcggttgttaatgacgaagcaggggcaaacaatccagagctaattttccgcaaatcaaccggaaacgttgaatacatgaaggaaaagaacgctcaaacagtattgttcccaggtgatgaagtagcaaatgccacagattcagctagactagctccaatgctaggcttaactcactttaaagatggtggaataggttcgttctttagtggcttatgggatagcactaaaaaggttgtttctaagattgctggaagtctacaacaactttggaaggttggaactgaaattgtagctgacccagctaaagctttaactaagattatgccgttctctaaaggtggcgctaaaggattcttcccaactatggttaaaggtggtttcgatttcgttaaaaaggctgccggtaactggtggagcaacctctgggatatggttagcttaagcggagatggtagtggttcatacggtggaggctggcaatcaccaggtagtggctggtcacatactgatagttttggttcacctcgtggtggtggcgttcatgatggtaatgatttttctgcaagagtaggaactgcattccatgctatgcacggtggtacggttatccgtgttggtggtgctcccgctggctggggtcctgttggttataacatcgttactcgtgattcaactggtaaagagattatttatcaagagtttggtaacgccaaagacgttagggttcatcaaggacagcatgttaaaactggcgacacccttggtgttctaggtcattctggattaggaactgggcctcatttacacgttggactaaccaaaggtggttcagtttggagtagaaacggtatgagcaccgcaggttggttagacattactaaacaacatggtaaagataaaggatcagatgctgacagtgattccgaatcaagtggcgatagtaaacttcaacagataattaagaaacaagttggtggcggattctggagtaccattaagaaaattgccagcttgtttggtgacgatggtggaactggtgatccaggtggagctggtgtacaacgttggaaatctgacgttaaaagtgcattgagcaagcttgggctttcaaccagtgcaagtatggttagccgagtattacgtcaaatcaatactgaatctggtggtaaccctaaagctatgggtggtactgatggtttagctgacggacatgcagaaggattgatgcaagttaaaccagggacgtttagtgcctatcatttatcagggcataacaatatctggaacggatacgacaatattttagctggcttaaactacgccaagcatcggtatggtagcggattgagtttccttggtaacgggcacggatatgctaatggtggaattgctaatactccatctatctttggtgaagcaggccctgaaatggctatcccactatctatgacgcgttctgatagagctaaccagttattaggtgaaaccgttgttcacatggctaaaaacaacccagacaggatagcgaacggagacaactacttaacaggttcacatgagttgacagaaattaaagcactattaaaagataccattggtaagcttaacgaagtcgttcaggctgtctacaataccgcacttactgaccaaagcattcacaatgcaaataagagagaaacagacaaagtaaattatctaagtaacttagggaaaggactaatttaatatggcagaagaattgcctttagcaaaacattcatttgaatttgatggaatcagagcttatgaagatttagggttggttgttggtcatattaactggccaactggaactacgataactcatagttcccaatcagttcctggacgttacggagaaataccacaaggtaacgcttatggtgcgaagacttggcaaattccagtttcgttccaaacctcatctaatgaagaacacatggaaacactaattaacatcacacgagcatttacgcgcagagcagaacaaggtgtttcatttccaatgcgttttgggactatgccagacgtaacttattatggaacgtttactgctttaccagaagctacacaaatttcagttggaaccaacgattcacaactaaccttgactttcactgcagatgatccaaaaggttataaagacccagttaccgttaaaattacggatagcatgttcgaatatactccagaaggaactggtgaaatttatccaatatttagaattactccaaaaaaggacatggaagaaattggtgttgcttatggctcagattccacaaaatacgttgatgttggttatgatcagactgccgatgaacagggtaatatcgttgataaagaacctgtgctggttagtgacccttgtaatggccttacaacttggacaaacattacagatatctcaaaaattaattttggaattaatggagtgattgatggttatgtaatgagtaatgacaattctatttctgtaaaacgttcacctaataatacaagtgccatgtacgactatggtgatcctctaaaacatacagatggaaaaatgtatggtccattgattatgcaccaagggttgccaagagcagttaaaaactttgaaacagatttcagaattaaccatgtaaagaattacagccgtgccatttcaggcaatgaggtatatggaattgattcaaacggtaaatgtatttttagagtattcatgcaagattcttcacaaggaagagcgacccttggggaaattcaaattgggcctgaaggtaatgctattcaagtctacaaaggctatagagattgggaaaataagaaaaactacactgaccacgtaacaatcgtaaagcaaggtaaggcttctaccaagaacactaaaggtggtaaaggtaaagctaaaacggatgttagttactaccaatctaacgtaaatattaaaaactttaataatacatctttttttaatagtggatttatccaatgcagaattagaaaaattggtttaaaagtttgggtaactttgtggaaatgcaatggcaaaaacggcaaaaaaggtgattacatttttaataacagggttatcaatctaaaaaaagaccaagattttgaccttgctacaattgcatggcacgcaaagaaaaccaatattgccgaagataaactcaatcctgagactggaaaggttactaaagaatataactatggctggaactccattacaagttattttgtaaaggaaatactagatgatggtaacggaaacgaacctcacccagtagtccatgcgggtgataccgttattattgattgtgaacgtaacgagacctcattaattcatggtgggtcagttgattctctagaaaaaagagtttcattaggctcaacatacccctcactttggggcggtcaatcagaggtgattggctttaatgtagacccaaaagaggttgacattgagatgacttaccgaccaacttatttatagaaaggaggacttttagttgtatgtaattttagatagaaaccttgaaagagttggttcactttctaatgaaggtggcacccccttttggggtgacgaagtaagcgttcaaattgctgaccaagatgccgatatcacgccttcagatgtgcctgttagttacaacgttggcacaagtcaaactaaccaaaaaaattggaaccatactctaaattctattaacattccttatggttatccagacacagataaaatagttattggtagttctcttgcttaccaagacccgactaacaatcgttggtatgttatgagaataactgatattgatgatggatttacaccaagcggagttcattacaagagtgctattggtatcaacctatctatttgggacatgcttcatacaaaaaccaacgcatggaataatgatgattcgagttggcatgatggcactggagatgtttatttagagcaagttgtaggtgctcttttagagggaacaggatgggtaccaggtgagattaattattctggaaacacctcaggcattacgattagtggcatggataatgctcaatcacaattacaaaacatttgtaaggctttcaattgtgagattgacgcttatgtactttttaacagtgctggtcaaattgttgaaaaaagaatcgactttgttaatgaattgggtgttgacgaaggtcgtacagttcgttttggtgatgatttaattgatatgaagcgtaaaacaacggatgcaaatttaatcacccgtttgtatccttacaatgttaacggtacagggattgaatccgttaacggtgggaaaggatacgtagaagatgagaaagcaaacaacttatactcatctggcgttttaaatattgatggtgctaagttcctagaaggtacggtacaatcaagtactatcgctaatttgagttctttaaaaaattgggctaaaactcaagttctaccaaagtttaatcacccacgtattaattatgagattactttaagtaataattttacggctggattgggcgatacaattagaattttagacccgaaaatggtaccagaagcaggtgttaagagccgtgtaattcagcgaacaatctcacaggctgaccctaaccaaaataaagttatcgtaggtgagtttgtaaccttacaggttataactcctagtattattcaacaaatacagaatgatattaataacaatgttagagaattgattaatgatctacgtaatggtacaaagacggcatctgtacagttaattacaccaactggaaagagctggagcaaggaagatagcagtaaaacaatcattgctagagtgtttgtagacggtacaaacttaaccagctatttgagtaaagcagcttttgtttggactaaaactaacaccgtaactggtgttcatgacttagtttgggaagaaaagcataaagacgacggttatcaggtaactcttgatgatggcgacgtaggtaacattacctgcaccattgaaggtgaatacttaaaaaccgaagcagagttgtcaatcagtattgataactctctttttttcgacaaaaaaaaggtagatttaccaaaagatcactggggtggcgctataactggcgcttttcaataccaatggtatgacgaggttaatcaaatgttgattgcctcagttgcttatggagacggcacaaaaggacaaggaaatcgttctaatgcagacgatactaaatatcatcgttttaaattagatggaacctatgttgattctatggtcgtccaaggtggcggtcatggcagtagtttcggagcgcacttggtcgatggtgtaccagaaatatggacattatcgaccaatacggcaggtggcaatgcttccttggctagatttaaatgggtacctaatgcggttataaatcaaggcaacggattagaggttatcgctaaaatgcctttaatagatggtcattggtttagacggatttcctgtgatttcgaacaaggatgggtgttatcagttatggctagtggaccagtggaagtattgaaagttgatgatttgctcgcgggcaagtggaacgcagtttacagttttaaaattcaacaatttggatttaatcctgtggctagtacgaagcccaactttaacaccatgcaatctaacgatatccattttccttacatgttcattaattctggtgacgcaaacaagaaagacccacgaattcttagttgtattaatgtagtcactgaatcggaagtgtttcatcgtgaaaacttgattgaaacttttggcaacaaatgggtagataactattttgaacccgaaacaatcggttactaccacgataaagaaggcccgtatgtactacaaggtttttccatgttgacaacggaaaatgatgttaattacttacacagaacactttttaaaactcgtttaaatgtacgtgatgatagtggtgataaaaagaactatatcgacaaagatactagtggagaggaggaaagcgtagtatgagttcaattggacaaggcagtataagcattgacgatagcactcgtattggtgaaaatgcacaagataccgcaaacaaagtagcgggaaatgtaaatgacattaatagtgataacaagctgacccctactgaaaagctaaaattaaagcaggaatatgacaaagatttaaagctctatgcaattgacgtatcacagctacaatctgctggtataccaaccactgaattagattctgctttgagtaatttaactaattttgtaactccattgttcaaagaaatgaatagaacttcaactgtagacagaaacgctttggatagtgtatttacagcttttgttacggcagataaaaactcctctcaagtatttgttaatatggttcaacaagtagcagatgatgctaaaaaagctggaagtgatgcaaaggaagtcggcaagaaagcacaagaagctggtgaagaagctaaagcatcagctggtcaagcacaagtggatgccactcaagctaaagcagacgcagctactgctcaacaagctttaaataacattcatttaagtgttaagaacgcagacggttccacatctactttcaatatgaatggtaatactatcttgatggatactgctcaaactatcattaatggtaaggcaagcattttagatgcaagtattgacactgctaagattgccaatgctgcaattaatacggcacagattgcagatggtgcgattaataatgctaagattgcgaacgcaagcattgatgacgctaaaattaacagtcttaatggtaataaattagttgaaaatagtattgcggctagcaaaattaacgttgacgacttaattgctaacggaattaatactaagaccttaacgtcggttaacttgaacacaagtacgttgacaactcctaacctcgacctcggatttaatggaacatttaccgaagattttgattatacacaaaatgcttcaatgttcttaccaaagaagaataaaggaacattgacctttaaccatggtgttttgcaatcctctggtaatatgcaaacctacgttggaggtcaatggggtggcatgaatagtaattacaatttccaagctggaattgataactcccaatggacggaagttgcgcccggttatatcaaactagatttattcagacaagatgatgccaattttgtagaacgtacctatatagatccgacaggttattactacaaatcaggaaatggcatcgctagttatttaggtaatgttttacaaactccacaagttcaaacgcctagtttaattggtaagtatatcgggccaagtgctggacaattacgtctacaaattggtagtaatggtaaagacttcggtttacaagttggctcttatggtggaggtgaaggagtattaagtgacttcatatataacactacatcaagtggctcatcaaatgtccatattaccgaaaatggtcgtctagttcgaacaacttctgcttcaaagtataagtacaacattaaaaatccggatattgaaacaactctgggagacagattgctaaatgtacacttagcaacatggaacgataagcgtgctgtagattcgtacgcagagcaactaagcacaggagaagaaagagaaaaatcttcaattgacaaatattatggtctcattgctgaacaattaagagacgctggtttagatatgtttattaattatggtaaaaaccatgaaatagagggtattcaatacgatcgagcatgggttccacttttatctgtcattagaaggctaaataataaagttaatgagtacgaattaagaattagtaaattggagggaaaaatcaatgaatgattttcaaataactaacattacaattgcaaatagtaatgataatgaaactaaaggagatttacgtaaaattggttattctggaaccttttcagatagttcacacttagaaggattcatcatgatgagtgaagacaaatttttcaccacaaattatgcagatttaaaaaacattgtagcaactcaaattattaaaaacttaggaggaaacaaaaatgagtaagaaagttagggaagtaattgaagaaacgaaaccagctaacaattctaatgaagaaaaagttaccgagttaaataataagattgcacaactggaaagaactaatcgagttttatctcaattaagtaatgatcgtaatgagagaatctgccaattagaaattgaagttgcgacatataaaacaatcaatagtaaggctgtctaaaatagacagttttttttataaaaaattaggaggaataaacatggcattatcaactaatcaaagtatctcattaagtggtgtatcaacgattaatggtgtacaggtggcaacattctcaactgtagtatctaaaggactatcatatacatcggtatcaacacaaattacagaccaagacttatacgaaaagaataaggctgaagtacgcaaagatcggaatgattttcaaacggtagccgataacttatctgatagcctagaatcaggttctgttaaaagcactgaataaataatctaacgatttaaaagaaagaaggtataagattgcacatgttgttaggattgtcttggggagaatgggcatcgattacaactattattgtttttatggcaggcgtggttagcctgctttttaagtacatcgtttttggctcatttcaggacgacataaaagatttaaacagaaattttaaaacactcaatgataatctgagagaaataaggattagcattacggagttagataagcgattagacgagcacgatcggcggttagaccgccaccacgagcgaattaaggaattacatgacaaaataaggggaggcagttactaatgaaaaatttaaaaaacatcaattggcatgatgggaagttatgggcgggattgattagtttaggcattgtgttaattcaacaattaatggtagcttttggctacaattatccagtcaactggcaaaatattataggaatcattaacaccgtactgacaatattagggatgttaggggtaattagtgatgtcacggtagttagtaaccaaaaaggagaaccagatgacaaaactaaataaattaaaatgggttgttgcgattgcagcagccttttttgttggaacaacatttacttctaaagtaagtgcagcaactattaacaacgattacgctttgagttcaaaccaagggtcatcgttacgaacaagcaacaacgtaatcattgcacatgctacagcagtatatgctcctgctaaaaatgtagcaatttatgaaaatcgtgaatggtctaacactactgcttacgtccagtacgttgttggtgatggtggcaagatttaccgagttggtgccgaggggtaccaagcgtggggggctggttcatgggctaatgctaatgcaccagttcagattgaattagcacagacgtattctagttcagagtttaaacaagattacatcacttacgttaacttgttacgttctagcgcaattaagtatggaatcccgaccgatgttgatagttcagcatggcgtggtgttaagtcccatctctgggtaaccaatcacgtttggggcgaccacaccgacccttatggctatcttgcaagccacggtattactaaagctcaatttgcgcacgatgttaaatatggatttagttcatctggaaataacgtaaatccagctccaaaaccaaacaagcctaataaaccagtgaaaccagcaaaaaaggaagctgttcacgtaaactatgccttacaccaaaaaggtaaacaatggttaagcccagtcaaagattttaattctgggtcaaatggattcgcaggtgttcctaatagcaagcacgacatgctatatatcaaggttaaccatggttcactcatgtatcgcgttcacacaatcgaagatggatggttaccttttgtacacaagggcaacaagaatgatactgttaacggcgtagctggtattaaaggacacacgattgatggagtgcaaatgtactatacaactccaaaaggtgagacttaccagcaagcttactaccgttcacaaactacgcaacgtactggttatctaggaacatgtgccgataatggttcagttgctgggtacgataactttgctggaatgttaggtgaacctttggatagattgcagattcatattaacgacaatagtaaatattaattatcaagctttttaagctctctggtcataatgactggagggcttttttattgtctaaaaaacaaaaaccactcaatccttaactgggatgagtagtttttttattgtctattattagcatgagctactttaatttttttggggacattttggggacatacccttgtttttgtactaatttatacagcctcttaaaaataaaaaacggctatacaatagtgtttatcgtctattaaaaacattagaatctttaatgtataaatgataaaattaaaacaactgtattgttagattaaataaaaacataaaagagtaggagcataatcatcatggtaaaagagtttccagatgacacattaactttgcatacagatgcgtatcaaatcaatatgatccaaacctattggaataaaggaattcacaacaagacggcgatctttgaagtgtttttcagaaatatgccatttgataatgggtatgctgtttttgctggattagaccgcattattgattatatcagtaacttacatttttcagagagcgatattgaatatttaaaggatgtggctggttatccagacgattttttagcttaccttaaagattttcattttagaggtacaattcgttctgcagttgaaggtgacctagtttttaataacgaacctattttacaagtagaagggccacttgccgactgtcaattaattgaaacagcgttattgaatattgtcaattaccaaaccttaattgctacaaaagcggctcgcattaagtcggtagttggttcagacaagttacttgaatttggtactcggcgtgcgcaagaaatggatgctgccctttggggaactcgcgctgcttacattggtggcttcgatgctaccagtaatgtacgagccggtaagaaatttggaattccagtaagtgggacacacgcgcatgcattggttcaatattacatgaatgattatgatgctttcaaagcgtatgcgacaactcaccgtgattgtgtttttctagtagatacatttgatacattaaaaagtggggtacctaatgctattcgcgtagcaaaagaaatgggcgataagattaatttcttaggagttcgaattgacagtggtgacatggcctatttatcgaaacgtgttcgtgaacaattagatgaagcaggtttccctaatgctaaaatttttgcatcgaatgatttagatgaaaaaacaatccaaaacttgaagatgcagggagctaagattgaagtttggggcgttggtactaagttgattacggcatatgatcaaccagcgctaggtgcagtttataagatggtgtcaattgaacgtgacggtaaaatggtggataccatcaaattatcaaataatgctgagaaagtttctactccaggtaaaaaacaagtttggcgtatttcaagaaactcagatggaaaatcggaaggtgactacatcactctttgggatgaagatcctcgagtagaagagtctctatacatgttccatccgaactacacgtatattaataaaacggtcactgattttaaagctcgtccagttttacaaaccatttttgaagatggtaaattagtttatgatcgaccaagtttggctgagattaaagaatttgctcgtcgtagtttggattctctgtgggatgagtacaaacgggatttaaatccacaagattatccggtggatctttcacaagattgctacgacaataaagttgctattatcaagcgagtccgtgaatatgttgggaaactaaaattttaacaaactaggtgataaaattgcgagaattacaaaaagagattattgaaaatttaaaggttcaaccgacgattgacccaaaacaggaaattcgtcgtagtgtagattttatgaaaaattatctaaaaaaagttcctagtttacgttccttagtgctcggaatctcaggtggacaggattcaacccttgccggtgcgttagctgaaattgcggttcgtgaattacgggaagaaacgggtattcaagactaccggttcattgcagttcgcttgccctatggtgtgcaagcggatgaatccgatgcaatgaaagcaatcgaatttatgcaagccgatgaagtagttcgaattgatatcaaaccagcggcagatgccatggttgctgcgttggaagctaatgatttaaaaatttctgattttaacaaagggaatatcaaagctcgtgaacggatgattgctcaatatggtattgcgggaagtaatgctggaattgtaattggaaccgatcatgctgcagaatctgttacgggattttatactaaatttggtgatggcggagctgatattatccctctttggcgcttggataagcgacaaggaaaggcaatgctaaaagagctcaacgcaccggttgaactttatgaaaagaccccaacggctgatttagaagaggagcgtccagcgttgcctgacgaagtggccttaggggttacttacgacgatattgacaactatctggaaggtcgcgaaattagttctgaagcggctgacaaaattgaaggttggtataaacggacggctcataaacgagttttaccttatacggttttcgacaactaattattaagagaaggggtttagcttgtaattagtttgaatggtcggttataattaaattgtagacatgagggagtaacttgcagactatctgcgataatatcaccaacaagaataaatctggtattatcttaatttagtgagactcatgtgtgtgggaaaagattccttgcgcacatgggtcttttttcatacccagcattaaaaaatagctaggaggaaagggaattatgcacaaagagcaatggcagttaacggtagaagaggttttgaagcaggaacaaagtaataaagagcgtggtttatctgctagtgaggttcaaaaaagaactgaacaatacggaaaaaatgttttagcaaccaaaaagaaaaccactcttttacagaagtttattgaacagtttaaagatttgatgattatcgtattgatgattgcagccctgatctccgtctttgttggcgaaggagtggatgcaatgatcatcatgctagtagttattttaaatgcggtttttggagtattccaagaagccaaggctgaggaggcgattgacgcgctaaaaagtttagctgctcctcaagcgcatgttcgccgagatggaagagtacaaacgataaaaagtgaggatttagtcccgggcgatatcgttctgctcgaagctggtgatatcgttccagcagatttaagattaattgaatctgcttcaattaagatggaagaagctgcactaacgggtgaatctgtaccagtaaataaagcagttgctcccattgagggagaaaatccggcactaggtgatcgtaaaaacatggcatttatgaatagtaatgtaacgtttggccgtggactaggtgtggttactggaacgggaatgcaaactgaagttgggcgaattgccgacttaattaataatgccgaagaaactattaccccgttgcaacggaacctgattaagttgagtaaaactttaacttggctaattttaggtattgcggtggtagtattcatagtagggatgttacgtggacaagaaaccttaattgatatgttattaacagcaatttctttagctgtagcggctatcccagaaggattaccagctattgttacgattactctagcattgggaacgcagcggatggctaaaagacatgctattattcgaaaattaccagcagtcgaaactttgggaagtactgaaattattgcttcagataagacagggacattgacccaaaataaaatgactgtggaaaaagtatttgtggataaccaactcctgaatgccgaagaggttattccagatactaaacaaaagctatacgatttaatgattttaaataatgatactaaaaaaattgagggagaattgatcggtgatcctacggaaaccgccttgattgcattcaatgattccaaaaattatcaagcggacgaagttattaaaagttatccacgggtggctgaggttccatttgactccgaaagaaaattgatgtctactattaatgctttggaagatggaagatatcttttaacagtgaagggtgctccagatgagttgttgaaacgaactactcaatatgtggaaaagaaccaaattctcccaatgaatgatgctgaaatcaaactaattcgggcgacaaatcatgaactagctacacaagctattcgagtattaggatttgcttaccagattttagacgaaattcctacagccttagatagtgaaactgtggaaaaagatttaatttttgctggtttaattggaatgattgatccagaacggaccgaagttgcacaagctgtcaaagaagcccaacaagcaggaatccggaccttaatgattactggtgatcatcgtgatacagcgggagcgattgccaaacgtttaggaatgattgatgaagatgaagttgatacagccgtaatcacaggagccgaacttgatcaacaaacggatgaagaattggctcgaaatgtagataaatatgctgtatacgcacgagtggcaccagaacataaagttagaattgtaaatgcttggcaaaaaaagggaaagattgtcgccatgactggtgatggagttaatgatgccccatccttgaaacaggcagatattggagtggcaatgggaatcactggtactgaagtttccaaaggggccagtgatatggtccttgcagatgataactttgccaccatcgtagttgctgtagaggaaggacgaaaagtttttgctaatatccaaaaggcaattcagtatcttttgtcggctaatttaggtgaagtattaactttgttcgtaatgaccatgatgggatggcaaattttagcgccggttcatattttgtggattaatctagtcaccgatacgttccctgctattgcgttaggacttgaaccagctgaaaaagacgcgatgaaacaaaaaccgcgtggtaaaaatgcaagtttcctatcaggaggcgtggctagtaatgtaatttaccaaggaattttagaaggggttattactttatttgtttatgcgatggcactccgttttccagatcatgctacggctactcaaattcacgcagatgcgttaacaatggcctttgcaacattaggcttaatccaactatttcatgcgtttaactcaaaatcagttcatggttctatttttagtgcaacaacgctaaaaaataagttcttcaactggtcaattgtaatttcgtttgtgctattagccgcaacaattgtggtgccaggattaaatgatttattccatgttagcaacctaaatctccaccaatggatgattgtaatttttgcatcattatcgatgattgtgattgtcgaagtggtaaaattaatacaacgtactttaaaaaaatagtggagagattaaatgagagctaatattcaaacttatgctggtacaatttccaaattaactgaaatacttgaacaaacaggagaccaggtcgatccatactttcaagaactaaaaaaatggatgcagttgggacaagttgctgatctagatcaagctaaattagcagaaattaagaatcaatttcagctggctacagataactaccgttcaattgaaaaagaacttacagaaatgcaagctcctatcaaatttatcgggaaacaccaaaatttgaaacatgattatcttcgatatgttgaagaatgtcaaaaaatggtggatacgattaatccagaagctaaaaaagttaatgctgaagattttaatgcttctgaaaaggctcaagcagaaattatgggccaaattaccaagacgttaactagaattatgaatatgttgcttgcataatgtttaatatagcaatacgagaatacgagaggttgagggagaagttggttcctcagcctcttcttgttagattattaagataatgggagaaaaagattttggaagaaaaaattttaaaaattgtcggaactaagttaaaagattatcgagcaaatcaaattaaagctacactagaaatgctagaggatggaaatacagttccctttatcgctcggtatcgaaaagaacgaactcaaagtttagatgaagttcaaattcgggaaattcaagcaacgtaccatcagactgaaacacttgaaaaaagaaaagccgatgttttaaaaaatattgaagatcaacaaaaattaactccagaattggcgcaaaagattcgtacagccgatgccttacaaacggtagaggacttgtatttaccatacaaacaaaaacggcggacgaaagcgacaattgctaaggaagcaggtttagaaccgattgcaacctggattttgggttttccacaaggaactttagctaagcaacttcaaagtgcgattaatccagaacaggatcttaatagtgttgacgatgttttagcaggagttcacgaaatattagccgaagccttctcggaccaagctgatatccgtgaatgggtgcgaagttataccaaaaaaaatggacgattaacggcagaagtaaagcccaagggccaagcaattgatgagaacggtgtttatgggatttactatgacttcagtgaaaaactgaatcaagtggcctcccaccaaattttagcgattaaccgaggcgaaaaagaaaaggtcctacgagctaaaattgaggttgatcctcaaggaatcgaacgataccttcactttcgtttgattggtaaaaagaccggcgaagcagttggtatagtcgaagatgcatatcaagatgcttataaacgttttattggcccagcaattgaacgtgaattacgtgcagaactgactgctatgggcgaccaacaggctattaaggtgtttggtgaaaacttataccatctcttgatgcaagcccctctaaagggaaaagtagtcttaggttttgacccagcttatcggaccggttgtaagttggcggttattgatgagaacggtaaatttttagataaattagtgatttatccacataaaccagcttcaatggaaaaacgagctaaagccggaaaacaattaaaagatttcattgagaagtaccaagttgaaatgattgcaattggaaacggaacagcaagtcgcgaatcagaagaatttgtagctaatttaattaaagaaattaagcgtcccatctattatgtaattgtcaatgaagcaggagcgtcagtttattctgctagtaacgaagcccgagaggcatttccagatcttcaagttgaagaaagaagtgcgattagtattggacgacgcttacaagatcctttagcagaattgattaagatcgatcctcaagcagttggagtcggtcaatatcaacatgatgttgcgcaaaaagatttacatgaacaacttgataacgtcgttgaaacggccgttaaccaagttggggttaatttaaatactgctagcccagagttgctaacccatatttcggggttaactaaaacaaccgctaaaaatattgttaattttcgagaggaaaatggaagctatcattctcgcaaacaattaaaaaaagtccctcgcttaggacctaaagcctatgaacaagcaattggttttttgagaattgttgatggagatgatattttggataataccggaatccatcctgaaagttatgcagttgttaaacaattagtgcagttattgggactaaaattgcaagacattggtaaagcggaagttaacgaaaaactacagggagtgcaggttaaagcagtcgctgaacagcttaacgttggctgggaaactttagctgatattattgccgaattacagaaaccgggacgtgatttgcgagatgaaatgccggcgccattacttcgatcagatgttctaacgctagaggaccttaaaccagggatggaacttcaaggaacagtaagaaatgtaattgatttcggagcatttgtagatattggggttaaacaggacggtttagtccacatctcaaaactaaagaaaggttttgtgaagcaacccagcgatgtggttgcggtcggggatattgttaaagtttgggttgaaagtgtagacgttgaacgccaccgaattcaattaacaatgattcctaaggattaaaatgacagatttagaattgcaacaattaactcaacgcattgctcaagagtcctttggtaaaagttttccgtataaggtggtctttaatcgacgtttaaaaaccactggtggtcgctatcatctaaatgatcatcatattgatattaatccgttgatgctggaagaattcgatgaagcgaccttgatcggagttattaaacatgaactagtgcattattttgtgcatatgttaaacgagaaaccagatcatcgaaacccacattttcagcagttgttacgagcggtgggaggattaaggtatgctccaaccacctctaagcgtcggcgaactcctcccaagttactatatcaatgccaaggttgtggattacaatacccccgacaaaggcggattaatacacgcaagtatgtgtgtagcaagtgtcgcggacgactcaaattattataaattagattttttaaaataaaacgtaaaaaaagtcttgctagcagtaggtagatttgatactattatctagtaagcttttgcggccatggcggaactggcagacgcgcaggattaaggatcctgtccgaatttactcgggtggaggttcgaaccctcttggccgcatcaataaaaaaggactcctagaaataggagtcctttttgtgtttctaagaactgtttcaatattgacacactttttaatacacaattaatgtattagtatcgatgtgtattaataagaatgctgattctacggtatttaatcattagtgtattttggcacggtatttgcttatatataggtgaatgcaaaatatgttgaattatcaatgtgtttcgcacatcgaagcgggtttaaccactttgatggatggatgtttatctgatgagaagccattttaaattaaaacttaaactttgaaaaacacgatgggattaatcagtcccatcttttatcctagataattgaaagcgttttttgaaaattttaatttaagttggtttccaaacgaataaacgttcaatttagatttaagttacaggttttagaacttattttatttattttttgattaagctgtaacaatataatatgggaggtatacagacagatggttggaattatcattgctagtcacggcgaatttgctaaaggtattttgcaatcaggttcaatgatcttcggtgaacaagaagacgttaaagctgttacattaatgccaagtgaaggccctgacgatatcagagcaaaacttcaagaagcagttgcttcttttagtaaccaagacgaagtattattcttagtcgacctatggggaggcactccatttaatcaagttaataacttgtttgaagaacacaaggacaaatgggcaatcgttgccggtttgaacttgccaatgctaatcgaagcttatgcttcacgtttatcaatggaatcagcacaagaaattgctgctcatatcattgaaactgctaaagaaggggttagggttcgtcctgaagctcttcaaccagaagaagctccaaaggcagcagaaagcgcacaagttgcttctggtcgtccaggacacttcgattatgtattagctcgtatcgatactcgtttacttcatggacaagttgctacagcttggacaaagacgactaaaccagatcgaatcatcgttgtttctgataacgttgctaaagatgaacttcgttcttcaatgatcaagcaagctgctccatcaggagttaaggctcatatcgttcctattgatcaaatgattaaacttgctaaggatgatcaacattttggtggaacccgtgccatgctattatttgaaacaccacaagatgctttgagagcaatcgaaggtggagttccacttaagtcattaaacgttggttcaatggcacattcacctggtaaagttcaacctaataaggtattggcttttgaccaaaatgatattgatacttacaagaagttggaagacatgaacgttgaacttgatgttcgtaaagttccaactgattcaaaagacaatatggatgcaattatgaagaaagctcaagatgagcttaacgcaaaaaaataatttaattataacggaggattaataatcatggcattgaatgcaattcaaatgattttagtcgttatcgtagcgtttttagctggtgtggaaggtatcttggatcaattccatttccatcaaccagtaatcgcatgtactttaatcggcttagtaactggtaacttagtaccttgccttatcttaggtggttcacttcaaatgatcgctcttggttgggctaacgttggggctgctgtagctcctgatgctgctttggcttctgtagcttctgctattattttagttttaggtggccaaggtaaagctggtgtttcatcagctatcgctcttgctgttcctttagctgtagctggactattattaacaatcattgctcgtacacttgcaactcttatcgttcacgttatggatgctgctgctaaagaaggtagcttcggtaaacttgaagcatggcactatgttgctatctgtatgcaaggtttacgtatcgctatcccagctggattgattcttgcaatcggtgctggtcccgtacgtagtttacttgctgctatgcctgcttggttgacagacggtctatcagttggtggtggtatggttgttgccgttggttatgcaatggttatcaacatgatggctactaaagaagtttggcctttcttcgcgcttggtttcgttttagcaactatccctgatttgacacttatcgctttaggtacaatcggtattgctttggctcttatctacttaaccctttcaaaaatgggtggttcaagtaacggaggcaactcaggttccggtgatccgctcggcgatataattgataaatactaaaaggaggccaacagaaaatgcaagaaaaagttcaattaactaaaaaagatcgtattcatgtttggttacgttcaacattccttcaaggttcatggaactacgaacgtatgcaaaatggtggttgggcatatacattaatcccagctcttaaaaagttatacaaaacaaaagaagaccgtgccgcagctttgacacgtcacatggaattctttaatactcacccatacttagctgcacctatccttggtgtaacaatgtctcttgaagaagaacgtgctaatggtgctcctattgatgacgttgcgattcaaggggttaaagttggtatgatgggacctcttgccggtgttggtgatccggtattctggtttacagttaagccaattattggtgctttagctgcttcacttgctttgggtggtaacatccttggaccaattctttacttcgtactttggaatgctattcgtatgggattcacatggtatacacaagaatttggttataaagctggttcaaagattacagaagacatgtctggtggtttactacaagacgttactaaaggtgcttcaatcttgggtatgtttatccttggttcattgattaaccgttgggttactgttaagttcacaccagttgtttcaactgttaaacaaagtaaaggtgcttacatcgactgggcaaaccttccaagtggtgctaaaggaattcaagaagcattgcaacaacaagctgctggtctttcattaactccagaaaaagttacaacattgcaagataacttggatcaattaattccaggacttgctggattacttctaacacttctttgcatgtggttacttaagaagggtgtttctcctatcgttgttatctttggtttattcatcgtcggtgttgtacttcacgtactccacgttatgtaataaacttaaattaagtctgggctatggcctaggctttttttattaaaatttttggtgaaatgtaccttaagtattataattggataaaaagaagaatggagtaatttgaatggctcaatcaattaatacaaaagcagatttggtaatcgatgctacctcatttttggggatgggtgattacggaaaaattatgattggcgatcacggttttgaattttttgacaatcgtaatgttgaaaacttcattcaaattccttgggaagaagttgatacagtgattgcttccttggtctttgggggtagatggattccaagatttgccgttaaaactaaacgaagtggaacctatagtttcgcttctaaaaaaacccatgaagttttaagagaaattagaaaacatgttgatgctgaccgcatggtacgttcgttaggggtttgggacgtaatcaaacgaggagtaatgagcattttcaagcgtaaagctaaataataattaaataatcttttgaaactatgctaaaaagcgatttgaaacggcctgattaaagcaagtctaaaaaatatttggacgagggacggaaagatgagttttttagcatagttttttgtttgaaagcgtttgttttaaaactgtgttaaactgtattgtatcaattagtgtattaatacagattgcggtgagaaaatgaaaagacaagatagaatttatgaatatgttattgaaaatacgcaaaatgtttccgatacggaattaaaggagcaagctgcattaacgacgagtttaatcgcagagaacttgaacattgctcgaagcaatgttagcaaggaactaaatgaattagttcgtaagaataagttatccaagattagtggacggcctgtacgttattgtcgacctttgacagaagaaggacaacttccccaacaatccagtcaagatccatctagctatcacattgaagatggtattagtggaatggacctggggaagaagaaattagcaggtacccttgaagaaccaactcgaccggttactttaaataaaaatactaatatttttgatcgaatgattggcaagagtcgaagcatgcataaccaaattgaacaagccaaggcagccatgttgtatccaccaagaggactgaacacattaattattggcccgactggttctggtaaaacatactttgccaatgcgatgtttgaatttgcccaaactaagggtttaattgatcgacagcaacagttggtaacctttaattgtgctgattatgcacacaatccggaattattgatgtcccatctatttggttacattcaaggtgcatttacaggggcaaatgatgagcaagatggtttgattcaagaggccgatggtgggatgctcttcttggatgaagttcatcgacttccaccagaaggtcaagaaatgattttctatttcatggatcatggtacttataatcggttgggggaaacttccaagaaccatcatgccgatgttcgtttagtctgtgctacaacggaagatccagaaagttcattgctacagacttttgttcgtcgaattccaattaccattcaacttccggcatttaataaacgtagtccggaagaacgaattgacctactacgttcattggtaacaattgaagccaaccgaactaataaagaaattacattaaccgaagatgttgtccaggctttattaggtagtgttacgtatggaaatgtgggccaattaaaatctaatattcaattagtatgcgctaaggggtttttgaacaatatcgaaaatgaaggcgaaatcatgattacagcggatgatttgccgtcaaatattaaggatggattactaaatttagcctctgaccgggctgaacttggggcaatttcgaagttactagaaccctacatggtaattaaaccgggatcatcttatgcaactcccgttagccgtaaagatagctatgaactgccctataatttgtatgaaatcattggcgataaagcgatgatgttacgtgaagagggtcttgaccaagaaaatatcaataattttattactacggatattaacctacatttaaaatctttctataagaatgaatcagacactcgtcaagcagaaagtaaactagctgaaattgtggataaagggattattgattttgctaaacaggttcagcctaagattgaaaatcaattagattatcattttaaagagaactttatatatgcaatgagtttgcatattagttcatttattaaacgaattcaatctggaaaaccgatgcggttgatgggcaatgatttagttgcaatggttaaggattatccagaagagttggcggttgctaaatcgattaaggaaatgctagaacagcggtatggaatgccaattcctgaatcagagagttactatttagcagtccttttaatttcactaagaacggtcccaactagtaatggtcaagtcggtattgtggtggcagctcatggaagtagtacagctagttctatgacacaagtcgtctctcaattattatctgacaactcgattcaagcttttgatatgccgctcgacatgaatccgcaaacggcgtataaggggattgtggagcgagtccgagctgctaaccagggggaaggagtacttctactagttgatatgggatccctaagtacctttggatctaaaatcacggaagaaactcaaattccggttaaagttattgatatggtaacgacggcgatggtcttggaagcgaccagaaaagcttcttttatcgatagtgatttgaacgatatttatgctgaactacgtgaatttcacggatactccagagttgcaattgcggatgaaagtaacgttgaagaaagagcagaagatctatccatgatttctgggaaacccaaagcgatcgttgcggtatgctccacaggtgaaggaaccgccaaaaaaattaaagatttactagatcaactcttagttcaaaatttaattgaggatatcaaagtttttccgatctccatagtaaacatgcaagatcatatccaacaaattaacaccaaatatacgattgtcgcagcgactggagtaatgaatccacaaattggagtaccatttatgcctcttcaaacacttttacagggtggaggagaaaagttcgttcgacagttggcagaacgtagcgaagtatcatgggtgcttgatgaacaagactctaaattgacgcgtagcgtttgtcgtcaatatttatcacagtactttgttttcttgaatgcggataagttcacggatattttatggaattatgtggattacttggcagaaactaagaaagtggaatttagtgaatccttccgcatcaatttaattatgcatattgcgggagcagtggaaagaatgcttaccaataatccgatggaaacagcaccggaagaattggctgcggttcaggatgaagtgtggtttaaattgatacaaaaagcggatgataagtatttgagaaggattcaaattgaaatgactccaagtgaagaattttatatttataaattgttggaaacatggcaagaaaaaaatgatacaatcctaagtgaggtagattaaaactaatcttaattttggaggacacggtgatatgacgatggacattctactggctcgtgtcgatagtcggctcttgcatgggcaagtagcgactgcttgggctaaaaaggttaaacctaatcggattttagtcgtttcagatagcgttgcagaagataatttacgtaaaacgttgattactcaagctgcgcctcctggaatattagtaaacgtgattacggttgaaaaaatgattcgaatttatcaagattcgcaatttgattcttttaaagtgttacttttaacggaaaccctacaagatatgttgaagctggttgatggcggtatcgatgtctctgatttagggattgatgtgggcagtttggcatacgccgtagatatgacaatgctaacagatgcgattgcggttggtaaagaagagattgctacaatccgaaccctacacgaacgtggattaacagtgtatgctcagaaaattcctaatgatagccgtaaagatttgataaaaatgttagataaaaataatttataataaaaaataacccacaactttaatagttacgggttatttttatggtccaaataaatgttaaagttcctcaagcacctgattttctttaatctttggttcgggttgtttttgacgattttgaatttctcgttctattttaaacaaaacttctttttgagaagcaggaacgtcaatgttaaaacgaccagtggcagtttcgattgttaaacgagccttgaatccggcaatacctagaattaaaccgataatgatggctaaaattccgattgttaagcctttattcatggcacttaaagctcctaaaacaattaaaattaaaccaagtagtagcgggaaaaactgatttttacctttgatgctggtagatttaatatcacttagtgcaatgtctttagaaattagaccataagggaaaacccatagtaatagacgagggatgcgactacgaacagattggttgtccacttcgacgcgacctttcatccaaaaaataagccagctaattgaaaaattaaacattaatattcctccagtattgttccattgtcttattaattaagcataattatttaacgattaaaaggcaagttttctacatgagatccattagatttcttaatataattataagaacttaattaatccgattgttacaacaatgaaaacgtttgttagatgtgatctgtcacgcacactattttcacaaataatattttactggtagaatagaatgataaacaaagtgaggaagaagcttaaaatgagtttaaaaattttatctacagcacattatgtacccgaacgggtggttgataacgatgagttatccaaaattatggatacaaatgatgagtggattcaatcccacacaggaattcaaactcgtcattatgccatgggcgaagagaatacatcaagcttagcagtcgaagcgggacaaaaattattaaacgaaagtggtttaacggctgatcaaatcgatgttattattctttcaacgattacgccagacgctttaactccggctactgcaaccattgtgcaagctaagttaggcgccaaaaatgctattgcttttgatatatcggctgcttgtgctggatttgtttttggtttaagtacggctgaaaaatttatgcgttctggacgttaccgaaacgcgatggtgattagtgcggaaaccaattctaaaatgatggattttaaagatcggacctccgcagtattttttggtgacggagcgggtggtgtaattatttctgctgatgcgcataacacagaagatttctttattgacgaagaattagccaccttagcggaaaaaaatgagtatattcatagcggccgaattccggctttaacggctgtgaaagctaataactttccaacaatcgacgcttttttccaaagtggacgagatgtttttagttttgctaccggagtagttcctcctcaaatggtagaaattttaaatcgaaatgatttacatgataaggttgattacgtaatctgtcatcaagctaacttaagaattattgaaaagatttctgaaacgattaacattccaatggaaaaatttgttacgaatgttgaacaatatggaaatacttcatcagctggaattccaatggcattggctcaactccaagaaaaagatcctaatcctaaaactgttttaatgactgggtttggtgcgggtctggactatggaagtatgttgattagaatttaatcattggaattaaaactaaactgtggttcgtaatgtggaccacagttttttagtatcttcatgtaaaaatttttaatgggattaagacttgcaactagttagaaaatgaataacaatgaagtagagttgaacgataagattgaattaatattgagcagggagagaaaagaattggctaaattagttttaattaggcatggggaaagtaccgccaatcgtgataatatttatacagggtggtcggatgttccgcttactccgcttggtattaagcaagcacaacgagcaggaaaattaattgctaaattaggaattaattttgatatggttcacacttcaatgctgaagcgcgcgattgtgactgctaatatcgttttagatgatcttaatcaaaattggttaccgattaataagacttggcgattaaatgaacgccattatggggctttaaggggacaaaataaggatgagacccgccaaatttatggtaaggagcaggttgctttatggcgtcggagttttgatgcagtaccacccctgctagagcatcccgatgatgatcgacgatatgcggttaatggaattttgaatgaaccactgggtgaaagtttacatatggcttataatcgcttgctaccatactggattgatcaaattgctcctagattaatggaaggacaaaatcaattggtagtcgcacatggaagttctttgcgagcattaattaaatatttggagaacatttctgaccagggtattgatggagtcgaagttgaaaatggagaacccatcatttacgaattaaaatcggatttatctatccaaaataaaattatcttgaaagaagcctaattatttaggctctttttttatgcataaagtattgatttcagtaaaatgggacaattttgtctctatgcgacaaaatagtgcgtacttctataaatgtcataattcacttatattatctatatcgtttgagagagaaaatatgaggtgagataatgattaatcaaaaatctaaagctaattttgctttatttgctttggcagtaatattttttgcggttggtatcacagaatttattagcgtgggggtactaccagcaatttcaaaaagttttatgattacgacttcgacagccggactaataactactatttatgctttaggagtagcattaggtgctccaattttaacaattttaactgctaaatttcagcggaaaggaactattttaggggctgttattatttttataatcggtcacttaattattggatttgctaccaattttggagaagtcatttttggcaggttaatagctggtgcttcacatgggttattgtttgcgctcagttcgacaatagccgccgaattagttgatgaatccagacaagcgagtgcaattgcttatatttttacgggtttcacaattgcgacagcactgggtgctccattggggacggcggttagtacttattggggatggcggataccttttttggcgattgcgactttaggaatagtagcatggattttaaatcgagtagctttacctaaacaagctagaaagaatgtagaaatatccagcatagcagatcaagtaaagttgattttgcatccacatgttttattaacgctcctaattaccatcttaggatatggtggtacttttgcaaccttcacgtatttatcatcaattttgcaaaagataacccatgtccctgcgaatcaagttagtttattcttagtgatttatggtatagctatcgcaattgaaaatacgcttggtggtaaactaggaaatgctaaaccgattaacgctttattcgggatcttcatcgttcaagggttagctttatttgctttttattttacagttactaatatatatttaagtactttaaatatcgtgctcttaggtttagttgcttttatgagcgttccggttctacagtcgtatattttaattttagctaaaagttattcatctaaagcagttgatgttgcctcatccttgaatatttctgcttttagttttggcattgtaggtgggtctttcttaggaggagttgcacttgatacttatggcttaagaagaacgatgctactagcagcagctatggttgcattagcagttttattgatgttggtagaaaataaatttgaaaataaacgtcagaaatagttttagaaaatgctgtcgttccaaaaggacgtgctaaaattacccagtaggaggtttggttagatgcctgaaaaaatatatcatgtagcagttgaagcaactttagatgtaataggaggaaaatggaaacccgtcattctatgtcatctaggaggtcgtactctaagaacgggagagttatgtcagttaatgccggacgtttcacaaagagtattgactaggcaattgcgcgaactagaagccgacaatattgttcaacgtaaggtgtacaaccaggtaccgccaaaggttgaatattctttaaccgaagagggaaaaagtctaagaaatattttattagtaatgtcaaattggggtaaggataaggttgaacgtctgcaaaaacaaggtaatagtgtagaaattattgataacgatccgcatcccttttcaaatatggagtagtaaaaaagcgactagttaaggaccgattttcatttggtccacagctagtcgcttttttattgataaaattatttattaatcttgataagccaaagatcccattgggtcccaaggtttcaaaacggtaggtgtttgagactgcgcttgacgttgcgcttcggttaagaattgtttttgaacaactacttggtaacaatattcgtccatccaggcatcggacattaccatatagcctttttcaccgacttttttaccccaactattttcaactttccatttagttggttgaccatcgacaagatcgacgccagtaagtaccatagcgtgagtcattaaactctctttgtagtctaaacgttcagctttagacattgaaagatcgatatcaaacaactcatcttcagcaaaaacatctaggtccaaaagtcccttttcacgagcctcagagtgttgaccaacatcgcaaccaaaccacactgattgtccagctttaagttggttgatggccgcctgcttgaagtcgtccatagcaaggtttagatgtttaacttggcgtccatttacgacattgccaagcatatcaattgtatatgtttggttgtaaggtttgtcagcagttggcgcattaatgatggaaatatattcggaaaggttccaacctacatacttatcataaaatgctttaggcgtaatacctgcttcacgatgataattttgatcggcgtcacgatattcccaatcgaattgaacaggtggttctccgaaactgtaagaagccatgcgatagacttcactaagcatttgttgcttacgttcatcaatgtctgtacgacttgcccctgaattaactaaattacgtaatgtaactgcatctttgcgtaacttttcatttagcaatgtgtcgaattcacgagattttgaactattataagtttcagggtaggccgattgaggaactacaccgtatttttcaatcaatgcgcaaagcatatcccattggccaccatcaccttgaggttcatttaataagaaggccactttacggtcatcagtatcaagctcggccgtattaatgatattttcgtagaaccaatttgatttttcaaacttatcccagaaaaaagtataattttgggataattcaaaattgccaggaactttgaattggtttttcatgtcatgacgcatagtattcaaagcggcaaacatccaacaacgaccactttgtttctgattcgcaacatcaccggtatctaaatcaattgaaaaaacgggtgtgctttgaacatcagctgcaaggttacgactggaattaagaattccatttttagtaactgtgcgttcaataactttagcttctttacgaccgttatattcttgtttaaaaaggtcaattaaattttgtgaaatttctttactcaatatcttcaactccatcctaatattggtgatgattatacgctaattaaaaaaattagtaaatgattagaattatggtcgagcagtcaaaacttctggaccattttggcgtccaacaatgacagtattaaccatgtcaaggaacaatccttgttctacaataccaacttgtttgattagataatctgctaattgatgcggatgtttaatttcaccaagatgaagatcaattacgtagtttttagaatcggttaaaacatattcgccagcatcatttttcctaaattcaggatgaaggccttctttttcaagcttcttgaagacttgtttgctaccatatggaattacttctagagggagtgggaaggcccctaagtgatcaaccattttagattcatctacaatccacattactttttttgagtttgtggcaacaattttttcaaacaagtgagcggcaccgccacctttgataccttggaagtcagaactgatttcatcagctccatcaatggttaaatcaatatgatcaacctcgtcaacagatttaacattaatgcccaatgaacgggcttgttcagctgtacgattggaagttgggaccccaacgatatttaaattttcatttttaacgcgttcaccaagagcgtccaccataaatttaacagtagaaccggtacctaaacccacagtcatcccatcttcaataaatttaacggcttcttcgccaactagtttttttaattcgttttgatccatttcttaatcttcctttcgacttactaagctttgtattttagttgctgtaatttggtcgtgcatgttccattcggaaagttccggatggttgagaaaatattttcttgcaaagggacaaagaggataaattttctggttattttcaattgcaaaattaatgaagtttttcatcaatttgccaccccagccttgtcctcgaacttcaggattaacaaagacttcttcacagattaaagtatcaagatcgggaattttagaatagagcacatgtcctacttgcacaccttcggaattagtccaaaaaagacggtttgcttcgatatttctttccatacataagcctccttttcctacaataatcattgtcgccaagaaagcgcataaagtcaattgcttcaacagatttccgtttacaaagtgggtcaataaaaggataataaaataaatgattattaggagggaaaccgtaatgagtagaggatttgaaattattagtaagtatcaaaatcaaggattacatttaccccaacgacaaacaaaagcagccgctggatatgactttgaagcggcagaagattttgtgttgccgagtatttggaaattgaattttgtgaaggttttgtgggccctacgtcatcaagaaaatgtaacagacgaagtattagatgcggctcgagcagaattaaaaccatatttagtaccaacggggattaaagcatatatggaagatgatgagtatttaatgttggccaatcgttctagtaaccccctaaaacgtagtttaattttacctaatggggtaggaattgtggacgcggactactacaataatgaaagcaatgaaggggctatttttctccaacttgtaaattatggaattacagatgtaaaaatcaaaaagggcgaacgaattggtcagggaatttttatgaaatatttagtagctgacaacgaaacggcctcagaacaaaagcgaactggtgggtttggttcgactaagtagtcattaaaaatcaataaaggtcaaactaattttgattaaattatagaaataaatgctatcctaattgtacgaatttaaagttgaggggggatttaaagcttggctaaagtaaaaacacagtttttgtgttcagaatgtgggtatgtttcacctaaattcttaggacgttgtcctaattgtggaagatggaacactctggttgaagagcggattagtgaacctaaaaatgaacgtaagagtcgcgttagttttgagggtaaaagtagtaaaccacaattaatttcagaagttaaaatgcacgaagaaccgcgagttaaaacagggatggaagaactgaaccgagtactcggtggtggagtagtagatggctcactagttctaattggtggagatccaggaattggtaagtcgaccctattattacaactatctgggcaattagctgctactgatcgagatgttttatacgtgtctggggaagaaagtgcttcacagatcaagatgcgcgccgaacgtttacaggttaacagtgaacgtttttacttataccctgaaacagatatgtccaatattcgtgcggtcattgaggaactacatcctcagtatgtaattattgattctgttcaaaccatgcaagagcccgacattgattcagcagtaggtagtgtatcgcaaattcgagaaattacagccgaattaatgcagattgctaaaacaaataacattactatttttattgttggtcatgtaactaaaggcggagccattgctggtcctaaaattttagaacatatggttgatacagtactttattttgaaggcgatttgcatcatacgtatcgaattttacgagcggttaaaaatcgatttggttctacgaatgaattggggattttcgaaatgcgagaggaagggcttcgagaagtagccaatccttcggaaatctttttagaggaacgcctgcaagatgctaacggttctgctattgtggtttcgatggaaggtactcgaccaattttggtcgaaattcaagctttgattacgcctaccatttttgggaatgctcagcggactgctagcgggttggatcgtaaccgagtctcattaattatggcagttttagaaaaaagggctaatttaacgttgcagaaccaagacgcctacttaaaggctgctggcggagtgaaattggatgagccagcaattgatttggcaattgcgatgagtattgtatcgagttttaagaatcaagggacgagaccgactgatagctttgttggcgaaattggtttaactggtgaaatccgacgggttaatcgaattgaacaacgggttgccgaagctcaaaaactaggttttcaacgaattttaattcctaagaataatttaaagggttggaatcctcctaaagggattgaagtagtaggagtaacaacgattacggacgcaattcgaaaggcgtttaattagaaaggaggtgaattaaaatgaaaaatattaaaaaacgaattgtccaagcggtgtttgctttggctggtggtactttaggaatgtcgtatctaccagttgtttggtcattatcaaatttggataagtttattttattaaacaatcgcgtaacgggctttgttattggtgcaattattttctgggttctatctatctttttggctggttatgtattgagtttaatgagacgagcagaaaaaatgttaactaaatcttcgccaatctatttaattactagtggtgttggaacggtcattggattggtcattgctattttaatttccactttattttatcgatcagatgtcttctttattaatacgatgattccattaattttaatgttgattttgggttatttaggttttcgaattggaacaactcggctaaacgagtggaaaaaattattccaagttcgcaaacgtgatttaaataatcaagatcaagtattggagcgtcgagcaggtgaaaattaccatcactacaagattttagatactaatatcttgattgatgggcgagtatacgatttagtaaaaactggattgttagagggaactttattagttcctaactttgtcttatacgaactacaatacattgccgattctgctgatagcatcaagcgggtgcgtgggcgccgaggcttagacttcttaaacaagcttcaaaatgaaaaaattatgccaattgaaatgtacgatggcgattatgaagaaattgaagaagtcgatagcaaactaatccaacttgctaaggacaaggacgccgtaattgtgacgaacgattataacttgaataaagttagtcaatttcagaatgtccaagtattaaatatcaacgagttggctaatgcgttgaaaccacgagtaattccaggtgaaacgatgaaagtacacgtcgttaagaatggtacagaacgtcaacaaggggttgcctatttggacgacgggacgatggttgttgtggaagatggtaagttttatatcagtgaaacaattgatgtcgtggttacgagtgcaattcaaactgatgcgggtcgaatgatttttgctaaaccggttcactccactaaggaaattacccatagcaaagataagacagaatagactttatttattattgatatcaatgtagaatgaaaacattgtgacataatttttggagaggtgttaattttggcaaagcaaaagattcgagtacgttatgctccaagtccaacgggacatctgcatatcggaaatgcacgaacagccttatttaattatttgtttgctcgtcattacaaaggtaaatttattcttagaattgaagatactgaccaaagtcggaatatcgctgacggagaaaaaagtcagatcgataacctaaaatggttgggaatggattgggatgaaggtcctgataaaccgggagaatacggtccttatcgtcaatctgaacgtaaaggtatatatcaaccactaattgatcagttagttgctgaaggtaaagcatatgaatcatatatgactgaagaagaactagctgctcaacgtgaagagcaaaaggcaaatggtgaaatgcctcattatgttgatgaatatgctggattatcacctgaacaaaaagaacaaaaaattgctgatgctaaggcagcaggaattgaacctgtaattcgttttaaggtgcctaccaacactacttacgaatgggatgatttggttaagggtcatatttcatttgaatctgaaacaattggtggcgattttgtcattcaaaagcgtgatggaatgccaacttacaactttgcggtagttgttgatgatcatatgatggaaattagccatgttttccgtggggatgaccacgttgcaaatactcctaaacaattgatgatttatgaagctttaggatgggatgctccccaatttggtcacatgagcttaattatcaatactgaaacaggtaagaagttaagtaaacgtgatgaatctattcttcaattcatcgaacaatatcgtagtttaggatatctaccagaagcaatgttgaactttattatcttgcttggctggtcaccagtgggagaaagtgaaatctttacgctacgtgaattcgttaagatgtatgatgaaaagcgtttgagtaagtcacctgctgcttttgatgctaagaaattggaatggattaacaaccaatatgttaaagctgctgatgaagatcgtatcatgcactcagcactccttcaattgattaatgccggtaagattgaaaagaacccagcaccaatgaaggtagaatgggcacgtaagttaatcaacttatttaagcgtcaaatgagttatacagcgcaaattgttgaatttacagaattattctttaatggtcctgaaaatatcgatgaagaggctaaagaagaattggccacggatgatgctcttccagtattaaaagcattggaaaaacaattcagtgatttgccagtctttgatacagttaacattttggcagctattaaggcggttcaaaaggaaactggaattaagggtcgcaaactttggatgccaattcgaattgctattacccatgaaatgcatggacctgaacttccagaaagtttggaattattaggttatgaattatcaatgcaacatttacgggcaatgattgaagaattaagctaaatatgaaagaagaactccaataaagttaggtgggagacatggactccgctaccaaacgttgatgcttggctcagcgactaaaacttttttgaagctcttcttttttatattcactttgcgttgcatactcttttcaattatcattagagatagctaaaaatccccgtagggagtgaaaaaatgattaaaatttataatacaatgtctagaactaaagaaactttcaagcctttagtggatcataaggtatcaatgtacgtttgtggaccgacagtatacaactatattcatattggcaacgcgcgtagtattatcgcctttgataccatcaggagatattttgaatatcgcggatttgaagtgaaatttgtttcaaattttactgatgttgacgataaaatgattaattcagctcgtgaacaaggtattacagttccagaattagcagatcgttatattgaagcttttaaagaagatgtccaagctgttaatgtagaaccagcgacgcttaatccacgggctactgagaatatcgatgatattatcgcatttattgcagatttgatggataagggctttgcctatgcggtagacggcgatgtgtactatcgggcacgtaagttttcgaagtatggtgctctttcacaccaaaatattgatgaattagaacagggtgccagccagcacgtagatgatgaagaaacagctcgtaaagaagatccaattgactttgcgttgtggaaggcagctaagggtgatgaaattgcttggaaagcaccatggggaaccggacgccctggatggcatattgaatgttcagtaatgtcaaccaaatatctaggagatacttttgatattcatggtggaggagaagaccttcaatttccgcatcatgaaaatgaaattgctcaaagtgaagccaaaactggtaaacagtttgctagatactggatgcataatggattcgtcacagtcggtgatgataacgaaaaaatgagtaaatctttgggaaactttgttacggtgcacgatttagttcaaaaaataaatcctcaagtcttacgtttcttaatgtcgactactcaatatcgacgtccaattcaatatacacaagcaagtttacaagacgctaaaaacaatctagaaaagctacaaaatgcttttatcaatttgaattatcgtttgcaaggtgctcaaggggcagctgacgcaacgattgctgaacaggctgctcaattagaaacagactttattacagcgatggatgatgactttaatgcccaaaatgggattaccgttgtttacgagtttgcacgcttaatcaatgtatatagtgaaaaaacagccgtgaatgctgagcaaattaatcaattattaaccagctatgctaaaatggcagctgtttttgggattgaattgaaacagattgaaaatgatgatgctgaaattgatgaattagttaaacaacgcgatcaagctcgtgcagaccgcgattttaagactagtgatcgattacgtgatcaattaaaggaaatgggtgttatcttagaggatacgccacaaggaacacgttggagaaaaaaagatgagtgaagagtttaattaccaagcaattaatggaattgcactagcctatttgggtgatgcggaatacgaagtttttattagaagacatctaatcaaacaagggtttacccgtcctaatcggttacatcacgttgcaaccagatatgtatctgctaaggcacaagcagctttaattaacgcaatggaagcagaaaattttcttactgaaaaagaaatcgaagctttcaaaaaggggcgtaatgctaaaagtcatacgtctgcaaaaaatacatcagtccttacttaccgaatttcaacgggatttgaggcaattgttggatatctgtcattgacaaatcaaactgaacgtttagctgaatttgctcaatggtgtattgaaaaagtcgaggaaggaaatttacgtattgaataattcaaatgaaacgcaacaaccagattttgtcattggccgccatccagcaatggctagtttgcaaagtgatcattcaattaacaaggtttttattcaagaagggctaaaatcggatggaattggacaaattattgctaaagcaaaaaaacaaggtctggtaattcaacgagttactaagtcgaaattggatacattatcgaacggacaaaatcaccaaggggtggtactagcggttgcatcctttgaatatgctgaattagatgatatcttcaagttagctcaagcgcgcgaagaggaacccttcattttaattttagatggaattgaagacccgcataacttaggttcaattttgagaacggcggatgcagcaggcgttcacggagtaattattccaaaacgacgggcggttggtttaaccagtaccgtagccaaaacttctgcgggagcaattgaacgagttcccgttgtccaagttagcaacttagttaacgcgattaaagaacttaaagaacgtggactttggatttttggcactgatatgaagggaacagattatcgccgctgggatgcaaaaggggcggtaggtttgattatcggtaacgaaggaaaaggtatggcccgcctaactaaggataatgtggacgaaatgttaacgattccgatggttggtgaaattcaaagtttaaatgcaagtgtagcagccggacttttaatttaccaaggctataattcaagacatcaactttaaaaattagaaacgaatgattggaatgccaattattcgttttttatttacgaaaaatgcggttagaaaattttaacaaccttgctaagatcgtttccattgaaacagggaggaagcgtaatggcgaaacaaggtagtttggaagaattggatgagcttgaaatagttcaacaaataaaaaacaatgattcaagtaattttgaaattctatttaagcgatatattccaattattaaaaaattaagaacaagatattcgattcgtaatctagaatgggatgattggttgcaagaaggacgcatcgttttcttcaactcggtagttaattttgatgaaaatttaaaaattactttgggggctttttttcgaactaattttactaatcaaatttatagtatcttaagatttgagatggcctataaaagaaaagcgggtttgacggcgcaatcgatagaaagtgtcgatggtgatttagaaacagcaactaagaaaatttctaagattacaccgcatagtaatttagtcattaaggaaagttatgcggaatatgaatcattattatcaaaatttgaaaaagaagtttcagtgctcttgtttaaaggaaattgcccagaagaaattgcggaaaaacttggttatgaggtgattaagatccaaaatgcgatagtacggtgtaaacaaaaattaagtgaacaaatgtatggtcgcccttaattgacaatcggggttgcacatgctaaagtttaatttcgataaggagggattttttatgtcccaaaagaaagtagctttagcatgtactgtttgtggttcaagaaactacacagtagcagctagcccgcaaagaacagaccgtttagaggttaataagtactgtaaacgttgtaacaaacacactttacacagtgaaacaagataggaggcgtattaaatgtttcgattttttaagagcattggtcaagagatgcgagaagttgactggcctaattttaaacagttaagaaaagactcttccactgttatttcaacatcggtattttttatagccttcttagctttagccgattggctaattcaattgttccttaagctatttgtataatggcataaggtcgattattttgttataatttaatttgttgatagaaacttcgtgcttacggagtttttttattttggaaaaggagcgcttaacttggaaactgaagaaaaaaactggtatgtgttacatacatattctggatatgaaaataaagttaaaaataacttggattcacgtgctaaatcaatggggatggcggaatatattttccgagtagttgttcccgaagaagaagaagttgaaactaaaaatggggaagacaagattgttaagaagaatgaatttcctggctatgttttggttgaaatgattatgactgatgattcttggtacgtggttcgtaatacaccaggagttactggatttattggttcccatggttctggtagtaaaccaactccacttttaccagatgaagttgaacgtattcttcgtcgcctaggaatgactgctcgtcatgctgatatcgaagttgaagtaggcgaattagttaagatcgtcgacggtgcttttgaaggtttgactggtaagattactgaagtcgataataacaacatgaaggttaaagttaacatcgatatgttcggtcgagaaactagtacagaactagatatcgaacaaattgataaaattgactagattttaatttgaacaaacatttcgggtgtggtattatatcgtagtatgccttgcatactcaatgtgggagaagaaatataaatcttcatcgtgaccacacacggacttattttaaggaggtatgtctcgtggcaaagaaagtagcaaacattgttaaattgcaaattcctgcaggaaaagcaactccagctccaccggttggaccagcacttggacaagcaggtatcaatattatgggatttacaaaggactttaacgcacgtacagctgaccaagctggcttgttaattcctgttgtaatcacagtttacgaagaccgttcattcgacttcgttacaaagacaccacctgcttcagttcttttgaagaaagctgctggtgtagaacacggttctggtgaacctaacacgaacaaagtagcaacagttacttctgctcaagttaaggaaatcgctgaaacaaaaatgcaagatctaaacgctgcagacgttgaagctgctatgcgcatgatcgaaggtacagcacgtagtatgggattcgtagtcgaaggctaatacacgcactgtcggatactccactaaagtggatgtatcaaagtgggaggaaaatccgctataaccacatttgctaggaggaaaacacacagatggctaaaaaaggtaaaaagtttcaagacgctgcaaaacaagtagaagctcttaaggcttatgctccaaaagaagcgcttgaattagttaagaaaattgattttgcaaagttcgacgctactgttgaaacagtatacaagttgaacgttgacacaaagcaagctgaccaacaacttcgtggtgccgttgttttaccaaacggtactggtaaagaacaaacagttattgtatttgctaagggtgctaaggctgaagcagctaaagcagctggtgcagatgttgttggtgacgacgacttagtacaacgtatccaagacggatggttagactttgacgttgcaatcgcaacaccagacatgatgggacaagtaggtcgtttaggtcgcgtattgggacctaagaacttaatgcctaaccctaagactggtacagttactatggatgttgaaaaggctgttgctgattctaagtctggtaaggttacataccgtacagaccgtgacggtaatgttcatgtgccaattggtaaagtatcatttgatgttgaccaattacttggtaacttacaaacaatcaacgatacaatcgttcgtttacgtcctgcatctgttaagggtgcttacgtacaaaacgtatcagttgcatcaacatttggaccaggagttaaggttgacttttctcaattctaaaatctcttgatttgttccaaacgctgtgatatattactaagagtgaattataactgaataatttacctaagactcaggtggtcatgtttggccttaatatattgcctgccgaggaacgtatgaaactattcgtgtctcagagtctttctggggtacgaatttttttatggttcaacaatcattcaggaggtgaaatacattgagtaaagaagctatcgcacaaaaagctgtaatcgttgatgaagttgctgaacaattaaaggaatctgtttctgctattgttgttgattcacgtggtttaactgttgctgaagtaacagacttacgtaaacaacttcgtgacgctggtatcaagctacgcgttatcaaaaacaaagtgttgacacgtgctgctgaaaaagctggttttgaaggtatggacgacgtgttcgttggtccttcagccgttgctttctcagaagaagacgctgttgcacctgctaagattttgaagacttttgctgacagtaatgataacctttcaattaagggtggtattattgaaggtgaagttgctgatatcgatacaattaatacattcgctacattgcctagtcgtgaagacttgcttgcaatgcttgctaatgaatttatgtcacctgtacgtgacgttgcatatgcacttaaagctgttgctgacaagaagtctgaagaagacgctgcataagcaaataacatttaattataattaatttggaggaaacaaaaatggcattagataaagaccaatttattgaagacttaaaaggtgcttcaattactgatttaaacgatcttgttaaagcaatcgaagacgaattcggcgtttcagctgctgctccagttgctgcagcaggtgctgctggtggcgctgctgaagctaagacttcattcaacgttgaacttacttcaggtggttcagctaagatcaaagttatcaaagcagttcgcgaaatcacaggtgctggcttgaaagacgctaaggacatggtagacaacgctccttctgtaattaaagaagacgtttctgaagacgaagcaaacgaacttaaagctaagcttgaagaagctggcgcaactgtagaagttaagtaatttaatttcttaagttagtaaaagagctatttccatttggatggaaatagctctttttttgttttaaaaaatattcaaataaagactttttgataaataggatgacagagcgttacaaaaaatccaacttctaaaatggaagttggatttttttatttggatttaaatgttgtaatcttcatcactcatagtttccacgttacccaaacgataaccgttaccaacttgtgagaagaagtcatggttagaagttccagttgaaatcccattcattacgatgggattaacatcagcttcagtatcagggaacaatgggtcttgccctaaattcatgagggctttgttagcattataacgcgtgaaggtaagaacttcatcagtccaaccaacttggtcatacaaagtatgaacatatttttcttcgttatcatataaatcgtataagaagttatacatccaatcctttatttcttgctgttcattttcaccaagctctttaagacctaattggaatttgtaaccaatataagttccatgaactgattcatcacgaagaattagtttaataatctcagccacattgtttagttgattatgacctaagtaataaaggggagtgaagaaaccagagtagaataagaaagtttctaaaaatacacttgaaatctttttcttcaaaggatgttcatcatcatgatataactcatagattcgtttagttttattttgaaggaattcttctgaatcactccaagcaaaaatttcatcaatttcagagggagtatttaaagtctcaaagattgatgaataactcttagcatggaccgattccataaattgaatgttatttaacactgctgtctcgtgaggagtgcgaatatcctttctgagagctgccattccgtcttgtgattgaagagtatctaacagagttagaccgccaaatacgtgacctacgacccatttgtggtcttcgtctaattcacgccagtcactaagatcatttgaaattggaatacgggtatcgagccaaaattgttcagtcaacttttcccaagtagctttatcaatttggtctgaaatggcattccagttgattgcttcatagttttccattaaaaaatcctccacttatttaaattgaacagctttcacattgatttacgccaacttcaccatcattatctgtgaaggtacgaacgtagtagatggacttgataccttcatgatgggcatagttacgaaggatattaagatcacgagtggtcattttatcagtgcggccttccttccaatcataaattccagctggaattgttgaacgcatgaagaaagtcatactcatcccttggtcaacatgttgttgggcagcagcgtaaatatcaataactttacgcatatcaatgtcgtaagctgattggtaatattttaacgtatcattggaaagatatggagctgggaagtaaattttcccaattttcttttcttgacgctcttcaattttgttaacaatgggttggagactagctgtcgcatcgttgatataagaaattgaaccagtaggagcaactgccattcgattttggtgataaagtccgtcagccatcacatcagctttaagttgcttccaatcttcaacgcttggaatttcaatcccattaaataactctttaactcgattggatttaggtccaaaatcattttctacatatttatcaaagtaagaaccatcagcatatttgcttttatcaaagttgtggaaaacttgattcttttctttggcaatctggttagaagcttttagagtccaatagttcaacagcataaagtaaacactagtgaattcaatcgaatctgcttcaccatagtaaaggtggttcttagctaagtaaccatggagtcccattgctccaagaccaatggtatgagcaagagcatttccgttttggatagaaggaacaacgtcaatatcagaatgatccgtaacaaaagttagcgctctaaccatagtttcgaccgatttaccgaagtggggcgtttgcatcatattaacaatgtttgttgaaccaaggttacaactgatatcagttcctagtttcgtatagttttgcttgttatcaattacggatggagtttgtacttgcataatttctgagcagagattactcattacaatttttccataaattggattttctcgattagccgtatcaacgttaacaatgtaaggatagccagattcctgttgaagtttagaaatttcattttcgatgttacgggctttaactttgaatttcttaatagcagggtttttgaccatgttgtcgtattctttagtgatatcgacgtaggcgtaaggttcaccgtaaactttttccacactataaggactaaatagatacatatcttcgtcgtgtttgatgaggtcataaaatttatcgggaacgactacaccaagtgagagggttttaacccgtatcttttcgtcggcattttcctttttagctgaaaggaaagatacaatgtcgggatggaaaacgtttagatatacaacaccagctccctgacgttgtcctaattgattggcataagaaaaactatcttctagtagtttcataaccggaaccacaccgctagcagcgccttcaatccccttgattggtgctcccgcctcacgaaggttagtgaggttgattccgaccccgccacctaatttagaaagttgaagagcagaattaatcgtacgaccaatcgagttcatatcgtcattagcttgaattaagaaacatgaaactaactctccccgatgcttacgaccggcatttaaaaaactaggagtagctggttgatagcgttggtgaatgatttcatcggcaatattcatggccaattcttcattaccatcagcaaagtagagagcgttcatagccacgcggtcgatgaagttttctaaataatattcgttattattcgtttttaaggcatattgagcgtaaaacttataagctgccataaacgattgaaagtggaagtcttgttgctttaagaagtcgtacagtttttcgataaaatcgaatgaatattcttcaacgagggcagcctcgatatagtcttctttgaggaggtaatcgaaacgttcacgtagagaatcaaattgcatggtgttagcttgaacattctcttttagaaatgcagctagagcttcacgatccttgcttaggggaatttggttatcaacagggatgttaatttcattgtttaaatcatagtaagtaacatcttttagatcttttaaagtcataattcgaatcctctcttcaatcaagtgaaataaaaaaacgctccgcatttacaatgtacgaatggggcgtcttgaacatctgagttagcgttggtggagaactaaattgctaatttttttagtaaatcgggtctaaaaccagccacaactttttcttcagaaaattgaacgactggtacggcttggaagcctttagcttttaaagcgtcgatatattctggatttgcattgatattacgttcttcaaaagtaaccccgttttcggataagaagcgtttagtcattttgcattgaatgcagttatttttagtgtacacaattatttttctcataatactgatcccccttgtctcatttatcatggaactaagtatacaacatttattactaaatttgaaataaaaaagcacaatatgtagaggatatatttttatgatcccactatatattgtgctggcggtgtttattaaattttattctttttaaattggtaactgaatttacaatacgatattatattaatagagaatggaggacttttcaatgacagattattattttactgaaaatcccaacgccgaacatgacgagaagcattggagctacgagcttttgggtcataaattaaattttatttcggatcgcggtgttttttcaaaaaacacaattgattttggaactaggacgttgcttgaagcaatacaaattgtaggttctgctgaaaagattttagacgtgggatgtggatacggtccaattggcatatcacttgccaaaagttttccagagatacaagtacagatgacagatgttaacgaacgcgcgttgggactcgccaaacgaaatgcagttgctaatagcatcgaaaaacagactcaaatttataaatcagatgcatatgagaatatcgatgatacggatttcaccatgattatttctaatccaccagtccgtgcaggaaaatcggtagttgagacaattatcgttgaggctaaatctcatttaaaagcaggtggccaactggtaattgttcttcagaaaaaacagggggcgccctcagctaaaaaattaatgcaagaaacctttgggaatgtcgaagtcctaaaaaagaataaaggatattatattttaagaagtgcacatgaataagttaacagagcatgaaattaatttttatatgaatgaagcaattaaagaggcccaattcgccaaaatgattgatgaggtccccattggagcagtggttgttcatgatggtaaaattatcggtcgtggtcataacttaagagaacactcacaggattcaaccactcatgcggaagtcttagctattacggaagcttgcgcttatttaaaaagctggcggctgtgggattgtcagctttttgtgaccattgaaccatgtttaatgtgtagtggaaccatcatcaattcacaattacctcaagtattttttggtgctcgagatcctaaagcaggagcggttcgaagcctgtataccgtactcgaagatacgcgtttaaaccatcaagtagcggttcatgaagggattgaagctgaccgagcatcgatgttaatgaagacgttttttaaagaaattcgaaaaagaagaaaaaaaactaagtaaaatagtggaaatttttttaaaattcgagtatcatagttattgccgtaaggccttgaggcaaggttggacttacgaattgtgtcaggtccggaaggaagcagcactaagtatgctctggcttgtgccttaagttattgggtaaattaacgaactcttagtccattgggctaagggttcttttcttaaaaaaagcaaatatggaaggaaatcaaatgagttatcaagcattataccgtgtttggcggcctcaaaagtttgatgatatggtcggtcaagacgtcgtcacgaggactttaaaaaatgcattaataactgagcagaccagccatgcgtatctatttactggtccacgaggaaccggaaaaacatcggcagctaagatttttgctaaggcggttaattgtcactatcttaaagatggtgagccttgtaatgaatgtgtgacttgtaaagcgattactgagggaaccttaaacgatgtaatcgaaattgatgcggcctcgaataatggtgtcgaagaaattcgcgatattcgagataaggcaaagtatgctccaactgaagcagactacaaagtctacattgttgatgaagtccatatgctatcaaccggagcatttaatgcgttgttgaaaactttagaagaaccaccagctaatgtaatttttattttagcaacgacggaacctcaaaagattccattaactattatttcaagaacacaacgttttgattttaaacgaattacaccagctcaaagttatgatcgcatggtctatattttggatcaaaagggaatccaatacgatcaaaaggccctagcaattatcgccaaggctgctgaaggtgggatgcgagatgcgttaagtattttggatcaagtgatctcatttggtaacgaagaagtaactttagataacgccttattagttacaggaagtgttaaccaaaaactattagatcagtatttaacacaaatttttaagcaagaaacatcagcggcgttagaaactttgcatcaaattttagatgagggtaaagatggacaacgattaattgaagatttaattgctgttcaaagaaatttactcttataccaagaagatccccagttggtgcaagaacaaagcttgaatgatctatcggaagcttttactgaagaagcagctatggtgactggcgtggatctatatcagatgattgatacgttgaatagtattcaacaacaaatgcgcttcacgactcacccagatgtctatttggaagttttgacgattaagctatcacaacgaaaaactgcgaaagtttccaccgaagccccaaccggttccgtggataaccaagaagtggagcagttacgttcagaagtcagtcaattaaaacaagcaattcaaaagctacaacaaaatgtaaaaaatacgccaagtaattcacaatcagctcagcctaaacctaagaaaaaagcggtaggtgctaaacaagttaaaactccggctaatttaactaagatttatccgatcttggaaaatgctactaaggccagtttaaatacgatgcaggaactctggcgcgacttaatggatatgctatctgttacagaacgggctttaatgcacgtttctaagccagttgcagctagtaaagaaggagtggtcgtagcgttcaattacgactttctgtttgaaaaggccgtcgataatgaagtgcttcgtactgaacttcaacaaaatttagctaagttaactggttccgattttaaggtagtttatgttacagttgaagagtggccagaggtgcggtcaggtttcttaaatactcatcattttgataagaatcaagaaaaatctgaaccagaggcatcagagcaatctacacccaaagcggatgaagataatcaagctgttaaaaaagcggtcgaattatttggctctgaaaatgtaaatataaaaaatgattaaaggatggtaatacaaatgcgtggtggaatgggaaacatgcaaagcatgatgcgtcaaatgcaaaagatgcaaaaaaaggtaacagaagaacaagaaaaattaaatcaaactgaatttacgggtgtggcaccagatgacatggtcaaagttgtattcaccggtgatcatagaatgaaagacatcgtgattaatcctgaagcaatcgatgaagatgatccagacatgttacaagatttaattgtagccgctgtaaacgacgctatgaatcgtgtggatagtgaaactaataaaacaatgggaaaatacactaagggcatccccagaatgtaattaagaatcgtaggtgatagaccgttatgcaatatccagaaccgattgcgaaattaatcgatagtttcatgaaattaccaggtattggttataaaacggcaacccgattagcattttttacgttagatatggaaaaagatgatgtaaccgaatttgctaaggcgctgatttcagcacaacgggacctaagtttctgtagtatttgtggaaatattacggaagatgatccatgtgatatttgtcaggacccttcacgagatcaaaaagcggttttagtagtcgaagattctaaagacgtaatgtcaatggaacagatgaaagaataccatggtttgtaccacgtgttacatggcgtgttatcacccatggatggtaaaggccctgaagacatcaatattgctgcgttacttacccgtttacagaagaacgaggccattaaagaagttattattgctacaaatgcaactccagaaggggaagcgacagcgatgtatatttcaagattggttaaaccgtccggcattaaagttactcgtttagctcacgggttatcggtcggaagtgatattgaatatgcggatcaaatgactttatataaagcggtcgaaggccgaacagaaatgtaaagcaaaataattaaaagatgagttaatgcgattttaccaacgcgttagctcatttttttaaattaatatggtgatattttaattaaggttaatagacagtccttaaaatctaaagtagaataaaaacaataaataatttaaaacaagtaaggcggggaatactggtgaacgggcattttatatcatttgaaggtccagatggggctggaaaaacaacggttctgcaagcgatggtcgaacattaccaacagcgtttgaaggaacaattaacagtaacgagggagcccggcggaaatcctatttcagaggcaattcgaactattattttggataaaaacaacaccgagatggatgagcgaacggaggccttactctatgcggctgctagacgacaacatttggtggaaacgattttaccagctttgaaaaaaaatcatgtggttttttgtgaccgatttgttgatagctcaattgcatatcaaggagcaggcagaaaaattggtaccgatgccgtctatcaaatgaatctctttgctactgaaggagcattaccagaaaaaacaatttacttggatgtaccatcagaacttggactaaagcgcattatgactcatcggacggaagatgttgatcggttagatttagaacaattagattttcatcagcgagtccgttcggcatatctagatttagctaagaaatttccaaatcggattgtcgtaattgatgcgagtcaagaacttgatgatgtaaaaagagatgtaattgaagtgttagaccaaattttaaattagcggaggaatattattatggcaactaagttagttatcgcaattgtacaagataaagatgcaaactatttgagtgatcagtttattgatcaaaatgttcgagcaactaagttatccacaactggtggttttctacaatcaggtaatacaactttcatgattgggattgaagaaggacgtgtcccagaagtccttgaaatcatcaagaaagctagtcataccagagaagaatttatgacaccatctgttaacatggacgttaatatggaaggtactacggcctatccaattaaggttcaagtcggtggtgcaaccgtccttgttcttccggtagatcaattcgagcgcttctagtggaagatctgaaaaatttaactaatcaggctgtggaaaaacaacctgaaattgttaaacgctttaatgaaatgattgatagccagcatttgtcgcatgcctacctgttaaccggagcaggtgggattggaaaaaaagacgtcgctcaatgggtagcgatgcgtcttttttgtattgacttacagggatcaatgccttgtggagaatgtgaagagtgcactcgaatcatatcaggacaacatccagatgttgtagaaattgcaccagatggccaatcaatcaaggtggaacaagttcgttttttaaaatccgaattctctaaaagcggggtagagggcgcacggaaagtttttattattgaacaagctaataaaatgacaacgagtgcggccaatagtttgctgaagttcatcgaagagccttcaggagaggtaacggcgtttttactttctgaaaatagaagtttgatgctaccaactattgtgtcgagaaccgaaattattgaactaaaaccgttacctaaagatcgattgattaaggaattgacagagcaaaatatagctgaaacggatgctagaattttaagccggttaaccaacgatacgagtgaaattcaaacactggtagataacaactggattttggatgcccataaggcgttagaaaagtggtttataacggccactactggggacataactgcatttgtagacgttcaaactcgagtaatggctttggctaaggatcgattttatcaagaaaaaatattggacttgatgatgttatatgcaatggacctgttagaactaaagtttgatcaagaaacgattacttatgaagctaatcgacgtcagttacaagagttagctgatcagaccaacgtccgtcaactattggctgttgcagatgtattgctgcctttaaaacatcagttaagtcagaatttaaattttcaaagcgttgtggaaaaagcaacgattaaaatatgtaatatattcaaaatgagagggcgatagtgtggataaaaaagatttatttgatcaaataacagaagtcacgcgaaatactgaggatttgttaaataaactacacgaaacccaaagtgccatggtggaaatcatggaagaaaatgctgaacttcaaattgaaaatcaacatttgagagagcgtctaaagcaagcaaccgctgctgaaaatgaaggaactaagaacacaaaatatggtttatcaaagtcacttcaaaacttagaaaaattatatgcaagcggatatcacgtttgtaatgaattttacggtaagcatcgtcaagatgaagaagagtgcgcattttgtttaaccgtcatctatggagatcgctaatatgttaacgcaaaaaagtttcagccaatcgaatgaaggacgattatatctggtaccaacgccgattggaaatttagaagatatgactttcagagcaattaatattttgaaagatgttgatttaatcctagctgaagatacacgaaatactcaaaaactactcaaccactttgaaattgataccaaacagatgagcttccatgagcacaacactcagcagcgcattccaacaattttgaaaatgttagaagatggtcaacaaattgctcaggtatcagatgcggggatgccatcaattagtgaccctggtcaagagttagtaaaggcagcagtatcacaacaccttaacgttgtacctttaccaggctcgaatgccggaattacagcattaattgcttcaggattagttccccaaccctttactttttatgggtttctatcacgcaaaactaaagagcaaaaagaagagcttgaagttttaaaaaataatcctaatacagttatcttttacgaagcaccgcatcgtttagctaagaccgtcaaacaaattggtagtagtttcggtacgacccgtaaaatggttttggcacgcgaacttaccaaacgctatgaggagtttattcgtggaagtattgaagaagttcagcaatggattgctgaaaatgaagtacgaggcgaatttgtagtgatggtcgaaggaaatgatcatccacaggttactaccaataacgagtgggaaagcatgacgattaatgaacatgtgcaaaaaattatcgatgatgaacaagttaaaccaacaattgcgattaaacaggtcgctaaattgcgaggtttaagtaaacaagaagtttatgacatctatcatcagttagagcaataggagagaataatggctggaaagatacatgaagaacaacatttagtaacgcattacgaaggtgaccagaccggaacaatgaaagttcccatgattattaacgccatgttgttaacttcggataatcaaagtcagcaactaggtgttggaaatgcagttgtggataaaaccggattaggctgggtaattacacagtacgtgctgaaaatcaaacgactaccacgggttggagaacaaattgtagtaggaactagagcagttaataacaatgattatttctgccaacgggatttttgggttaaagatcaaaaaggtgaagtgattgtggaaaacacttcaatttttgtattgatggatcgaacaacgcgaagaatgcacaagctcctacctgaaattattgaaccctatgaagctgaccaggttaaacgtattgttcgtttgcctaaactggaaaccatcgaaggagcatcagttgctaaggatttcagtgtagaatattttgatattgatccaaatcggcatgtgaataatgccaaatattttgaatggatttttaatacagttgatcaagatactctaaataactattatccagcgatgattaacattcgttatcatgtggaaatccaacctaaccaagttgcccatagcacttttacgatggatcatgatacactcaaaagtgatcataaaatttttgctaatgacactttgtgttgtgaagcaaatgttgaatggaatcaccgttaaggttacaatgagcgtagtttaaattttacattggaggatgaatgaatgagtattcttgtagttggaggagccggatatattggttcacatatggttaagcgattagtcgaacaaaatcgagatgtagtcgttgtggataacttatcaactggtcatcgtggcgcagtggataaaggcgtaaaattttatgagggcgatatccgagatcatgcctttttaaaggaagtctttgatcaagaagcaattgacacagttgtgcattttgctgcattttcaattgttcctgaatccatggaaaaaccgcttaagtattttgataataatacggcaggaatggttgctcttcttgaagaaatgcgggatcacgatgtaaaacgcattattttctcatctacagctgctacttatggagttcctgaaaagtctccgatcgaagaaaccgaccgtcaagcccctatcaatccttacggtgaaagtaaattaatgatggaaaaaatcattaaatgggcggatcaagcttatggaatcaaatttgtagccctccgctactttaacgtagcaggagcctatccagatggttcaattggcgaagatcatggaccagaaactcatttaacaccaattatcttgcaagtggctttaggtaaacgtgaccaattacaaatttttggtgatgactatcatactccagatggtacgaacgtacgtgactatgtgcacgttttagatcttgcggatgctcatattttagcaatcgattatcttaaagcaggtaatgatagcgacgtcttcaacttaggttcatcaactggtttctcagttaaagaaatggttgaagcagcacgtgaagcaactggtgaagccattccagctaaaattgcggctcgtcgtcctggagatccagattcattaattgctgcaagtcaaaaagcacgcaaaattttaaaatggaatcctcaatatgatgacgttaaagaaatcattaaaactgcgtggaattggactcagaaacatcccaatggttatgaagaccgctaaaataaacgtataaataattttaattgaggttatgacataaaaatttgtcataacctctttaattttgaaagaaatgaccttgaaaggacgaatttattctttgttgtcgtcatcactattctgtaggataatatgtagaggaattaaaagggagcgaactgaatgaagattttagctatggatacgtccaacgttactttaagtgtagcggttttggattcagaacaattactagctatgcaaaccactaatattaaaagaaatcatagtaaacaactgatgccaattatttcgcaaactcttgcagaagcagggatggcactaaacgaaattgaccggattgttgttgccaaaggaccgggctcatatactgggttacgaatcgccgttactacggccaaaacattagcattaacgttaaatgctgagttagtaggagtatctagtttagaaatgttggttcctaacgcacctcaaaatggtttagtagtcccattctttgacgctagaaatggaaatgtattcgccggaatttatgagaaagatggagaacaagttgtaaacgtactagcagaccaacatattagttttgaaaaattattggctaagattaatgagttaggtcgaccagtttactttgtatcttctcaatttgaacaatttcaaacaatggtagaaaatacgttggttgttgttgcagaacattctggaaaattaaacagtttaccaaatgcgcatgcattaggaatcttaggattacaaaaaacagaacttgaaaatgtttatacttttgtaccagcttatttacgagtgacagaagcagaaagaaattggaaggaaaagcatccaaacgatgaaaacaaagaatcatatgttagacaaattaattaattgggctaaatacactttttttaatcggacacgacgtttgcgtgaggaggcttttgaaattaaacaccataatgttgtaatcgaaggtgaaagatattttgtagcgcaggctactaataccgatattccggagatattaacggttgaacgtgctgtgtatgacggacaaaccccttgggatcgaatggcctttgccaacgaattgcgaagaaaattagaccgattatatttagttattaggcataatgaccaactgttgggctttatcggagcttcttttgatgatcgtagtaaaatggcgcacattactaatgtagctatcttaccggaatatcaaaaccgtggtattggatcgtttctaattgagtcgattattaaaaaagctcaatttattgaatacaaatcaatcactttagaagtaagaaaaagtaatattacagctcaagcattatatttaaagattggttttgaaaagacaggaatcaagaagaggtattatttcggcgatcatgaagatgcaattgatatgacattagatttgtcgaagtggcgaggaggatatcgtggatcaaactagtttaattttagcaatcgaatcaagttgtgatgaaactggtgttgcagttattaaaaatggtgacattattttatctaacataattgcaacacaaattaatagccatcagcgctttggcggggtggttccggaagttgccagtcgccatcatatcgagcaaattaccatctgcattgaacaagccttaaagcaagctgaagtacgtaaagaggacctcgatgctgtagcagttacgtatggacccggattagttggggcacttttagtgggcgtttcagctgctaaagcttttgcttttgcaaatgaattaccattaatcccagttaatcacatgattggacatatctacgctgcacgctttgtaaaacccattgtttttccagccttagctctccttgtttcgggggggcatacagaactagtatatatgccaaccgaaaatgaatttaaaattatcggtgagactcgtgatgatgcagccggtgaagcctatgataaagtggggcgcgtaatgggtttgaagtatccagcgggtaaagcaatcgacgaacttgctcaccaaggcgaagacatcttcaagttcccacgagcaatggaacacgaagataattttgattttagtttcagtggtttgaagagtgcttttattaatacagtgcatcatgcagatcaaattaatgaagaacttagtaaaaaagatttagcagcaagcttccaacaaagcgtgatagatgttatcacggctaaaacggttcgggcttgcgagcagttagaaataaaacaattaattttagctggaggagttgcagctaaccgtggtttacgggatactttagataaagaacttggcgaaaaatttaatcatttagatttcgttaaggcacctttggatctttgtggtgataatggagcaatgattggtgctgctggtgaaatgttaatgcgacaccaagtttttgctgatatgacgttaaatgctgatccaagtttagaatttgattgggaaccagaagcaattaagtaaagagtgggtgaataaatatgactgagcaaatgcatcaagttcatcaagttattaaaaaggaaattgaaaatcataatatttatggtgcttcctatagcttgattacgccaaaagaaattgaaaatcgttatgaaggtgtccaaggagaaggaccatctgccgttttattagatccttcaatgatttatgacctaagtacaatgacagaggtagttgcaaccacaactcgaatttttcaattacttgcaattcgagaaattggcttaaaagatccagtcactaaatatttacctggtttttcaaatcgagatattacaatcctacatttattaacccatactagtggattaccagtaacggttaataaatcgaaacattttacaggaatcgaatttactaacgcactatattctgtcggtctagattttaaacctggtgaaaaaatgcaagtttcaccacttaattttgtggtgctaggaattattattcgaacagtagacggttccattgatcgtgctgttcaagatcgcattttatatccactagcaatgactaatactggttttaatttaaaccgtcctaaggctcgctttgtaccaactagaaaagatgctaagcgaggacaaatccaaggacaagttgaagatcaattgggcttgttgttgaatggggaaagtggttacactggattattttcaaccttgaatgatttaacagtatttgttgaaatgatgttaaaccgtggtaattatcagggaaaagaagtccttgatccacagctatttgatacgatggaaaaattcaacattgatgggcaatcacttggttggagtcgttttagcgccaatgctgacgtattttatggcagtagtccaactggggttatcgcatttaatgttaagaaaaagcaaggtatggttgttcttcataactttgtggaaaataatcaagttcatgccaaaatgttaacaggattattaaaggtaattcagtagaaaaggtggaagaaaaaatggatgataataaaatctcattggcagcaactcgtcgtttaccattatactaccgttgcttgagtgaactaaatgaaaaaggcgaagataaagtctcttcagccgttttggaacggttattaaaaatcgacgctgcaaccgtacgtcgtgatttttcttattttggtcaaatggggcgacgtggatatggatatgatgtgaagattttattggaattatttaacgacgttttaaaacaagatacagctgctaatgttgccattgttggtgtaggtaatttggggcatgcgttaattaacttcaagtttcataagacgggcaatgctcggattaaaatggcatttgacgttaatcctgaggtagtaggtacgattcaaagcgaagttccggtctacgatattaatgaaatcaagcaacgtgttagagatgagaagattgaagtagccattttaacagtgcctaattcacaagcacaacgggttaccgatttacttgtagaagcaggcatcaaaggaattatgaatttcaccactgaaattattgatgtaccttataatgtaactatccatgatgttgatttatctctagaattacaagccttgatttactcaatggatcaagattaaaaaatacaaaaagctatgactcaatttctaaacgacggataagtcgcttattaagtcatagcctttttattttagtttataaaatatgaatttgattttcttcacattgatcaatcatcgattgaggccagacactagcttgaacttcaccaacatgggctttacctaatagcaacatgcaaagacgtgattgaccaattccaccgccaatggtgtagggcagttgatgattcaacaacatttgatgataagggagatggattcgatcctctgcgttagctatttttagttgttttagcatcgactcttcactaactctgattcccatgctagaaatttcaagggctttttgaagaggttcataccaaaataaaatatcgccgtttaattgccaatcatcgtaatctggtgcgcgtccatcatgacgttcaccactttttagcgtcccaccaatttgcattaagaaaacgcaacccagttctttacagatggcgtcctcgcgttctttaggagttaatttcggaaaacgatcctctaattcttgggtagtgacaaaatgaatttgatcaggaagatgatagacggcttcaggatatttataccaaacttcgtgctccatgtgtttgattactttaaaaattgtttgaactgtttctttaagggtagttagattacgctcactttgatcgataactttttcccagtcccattgatcaacatagatggaatgaatattatcaagatcttcgtctttacgaatggcattcatattagtataaagtccactgtgcatctcgaaatcaaagcgtttcaaagcaactcttttccatttagctagagagtggacgatttcgatgctggtttcaggcatatcttgcatagagaaggaaactggggtttcaactccatttaaattatcgtttaacccagtggcactaggaacgaacattggtgcagagagacgtgagaggttgagttcttttccaaattcatcttgaaaagtttcgcggatgtagcgaatggcctcttgggtttgacgtactgataattttggatcgtatgatgcaggaataattaaatccataattgattctcctttaataaattagattttaaggataaaagaaaaagcctttcatccatgacaagggacgaaagactttccgcggtaccacccaagttgcctatatttaataagccacctcaataagagtacaaacatactcctccgattggtaacgtaccggtcacgtctaagcctactttagcctatgctatttcagttagaaactaagaaagtgttattcaaaagtatcagggtctgattgggtttccacttatcccaactcactgacagaatgataaattctactcgtctctctttttgtcttcattgatttttaatttgattatcatattatcataagaaactgaagttgtaaaacataaatttgttgacagataaataaaaaagcgtattttaaaaaataaaactaggtggaaagtatgataacttcagatgcattgttagtgattgatttacaaaatggagtatgcagaggtagaacagatattgatcatttagaaaaattaattttacaagtaaaccaattaattcagtgttatcgagaaaaggaaaaagagattatttttattcagcacaacgaggttggattagtgtgtggctctactaattggaaaattcttcctgaaataaataacaaaataacagacatttatgtagataaaacccatgctaactctttttatctcactaatttagaaaaaattttaaaaagcaaaaacattcattcaatcgagatttgtggggctcaaacgcaatattgtattgatagtacagttaaaatggcgcatggactaggctataacttacaaatgcagaaaaatggtacaacaacttatgataatgaatttatgacggctaaggatacaatcgatttttatgaagatatttggaaagatcgctttttaaaactatattaatttccaaaaagctttgatgtagctaaatactgcattaaggctttttttattaatttccgagcttttaattaacgtatcgaactgtttattttttaaaaacgaactttttattaaaaattaaaataaaaagttcgtaaaatatcttgataaaactaattttacttgttacactgaacttgaaatttgatacagcatttaaatttggaagggaattgtcatgagaaaagtcgcagtagttatgggttcaatttctgattggtcaaccatgaaactggccacagacatacttgatgaatttgaagtcgattatgatcgtcatattatttcagcacatcggatgccgaaagtattacagaagtttggtgaacaagcacaagaaaatggatatgccgtgctgattgcaggagctggcggagcagctcatttaccgggaatgttagcagccaacacaatttcacctgtaattggggttcctattgaaagtcatgcattacacggaatggattcattactatcaattgtccaaatgcctagtggagtccccgttgcgactatggctattgggagtgcaggtgctaaaaatgctgctttattagcagctgaaattttagcgttaaccgataataaagttgctgaaaaattaattgaattccgtcaaaaacagactcaggaggctattgagagtgaaaagcaattctgaaaaagggattattttaccgccggcaacaattgggattattggtggtggacagttaggtcaaatgatggcgttagcggctaaagctatgggatataaggtgggggttctagatcctacgcgagattgcccaaccagccaagtttgtgattttcagattgtagccgaatatactgaccatcacgccttaatgcaaatggcggagcggagcgatgttttaacttatgaatttgagaatgttgatttagctagtttgaaagtagcacaagaattggtaaccattccgcaaggaaccaacttactagctattactggagaccgaatccgagaaaaaaattttttgagcagtcatggaattccggttaccccctatcaagttgttgaaaagcctactgatttagaagtggcaattgctaaattagattatccaagcattttgaaaactagtaaaggaggttacgacggacatggacaacaagatattaattccgaagcggatttgcttgctggacaacgtttagtagcccaagctccatgtatattggaacaacgtcaaaattttactaaagaattatctgtcatggtaacgcgcagccgtgaaggaatcattcaatgttttccagtagctgagaatgaacatcagcaccacattctacatcaaagtattataccagcccgggtttctcaaaacgtacaagacaatgcccgaaaaattgctcaaaaaattgctcagggattagaactaaggggcgttttaggaatcgaattttttatgttagaaaatggccaattattggttaatgaaatggcaccaaggccacataattcgggacattattccaccgaagcatgtaatatttcgcagttcgaagcccacattcggagcatttgtggattggctttaccaaaagtcacacaaactacaccagcggtgatggtaaatctcctcgggcagcaccttgaagttgctcgtcagaagttagttcaaagacccgattggcattttcatgactatgggaaagccgaaagtcgagtgaatcgaaaaatgggacacatcacaatattaggtgatattcaaaaaagcttagattcaattaaatcagaaaatatttgggagataaaataatgaagaagaccacgttgattaaagaaggcaaagcaaaaagactttacaatacagatgaaaaggatttggtgtgggttgaatatatggatcaagcaactgccctaaatggaaaacgtaaagatcacattgctggtaaaggtgaattgaataaccaaatcgattgtattttattcgagcaattagttgcaaaagggattcacacggactttgtccaacagctttcaaacaacgaacaattgaatcgtaaagtaaaaattattccactagaggtagtcgtgcgtaatgcggcatcaggcagtttccaacgtaagtttgatgttccgtatttacaagcatttgaccagcctgttgtggaatttttttataaatctgatgaattagatgacccatttattaatactaatcaagcaattgcgttgaaaatcattgacttagaagagagtcaacgattggaaaagatggcgttacaaattaatcaaattttaaaagaacgctttgctaaagcccatttgcaactggttgattttaaggttgaatttggtaaaaccgcagatgacgaaattgtattagcagatgaaatatcaccagactcatgtcgcttggttgatttaacaactaaagaatcacttgataaagatgtttttcgtaaaaaaactggagatttagtgaccgtctatcaggaagttttaaatcgcttgaataattcacaggaggaagttcatgtataacgccaaaatttacgttacttacaaagaatcgatcttagatccccaaggagaagcaattaaaacagcgttacatcgattaaactacgaaaatgttaaagctgtaactgtcggaaaatattttgagataaaaattgaagatcatggtcaaaatattgaagagcaagttagaaaaatgagtgatgagctactagcaaacattaacatggaaacttatcgatttgagattagcaggattgaggaggactagcaatgatttacagcattattcgttttccagggtctaattgtgattgggatatgtactatgttttgcgcgacgttatgaacgttgagcctcaatttgtggactatcgcgaaaaatccttaccgcaagatacagttgcagtcttaattccaggcggtttttcatatggtgactacttacgaagcggcgcaatcgcacgtttttctcccatcatggatgctgtaaaaaaatttgcctatgcgggaaacccagtaattggaatttgtaacggatttcaaattttaaccgaagccgggctgcttccgggggccttgcgatcgaatgatagtttgaattttatttgtaaaccacaaaacttagtggttgaaaataatcagactatctttactaaacgttttgatttaaaacagaccgtaatgtttcccattgctcatggtgagggtaactattattgtgattcggctactttacaaaccttaaaggatcatcatcaaattgtcttacgttatcaaaataatcccaacggaagtacagacgatattgcgggaattatcaatcagaaaggcaatgtgctagggatgatgcctcatcctgaacgcgctagtgaagctgtcctaggcggcgaagatggcaaaatgctgttccaaagtttagttgaaaacatgacgcaaaatgtttaattaaaggagttttcgcaatgatgaaggaattgacacctaccgaaattcgagatcaaaaattgtatttacaatgggggataagcgaagacgaatatcagaaaattaatgatgctttaggtcgcctacctaattttacagaaacaggtttgttcgctgcgatgtggagcgagcattgtgcatataaaaattctaaacccctcttaaaacaatttccaacaacgggttcacagattttacaagggcccggggaaggagctggaattgttgatattggtaacaatcaagcggtggtctttaaagcagaaagtcataatcaccctacggcagtcgagccttatcaaggagcggctactggagttggaggaattattcgtgatattttttccatgggagcgcgtccgcttgcattaatggacagtttacatttcggtgaattgaatgatgcccatactaagtatcttgttgaccagacaatagctggaatcggcgattacggtaattgtatgggaatacctacagtaggaggagaaacgaccttcgatgcaatttatcaaaacaatccagtcatgaacgcaatgtgtgtggggttattggatatcaacgaccaacaaaaaggagcggctgctggtgtaggtaatgccatttactacgtgggggccaaaacgggacgtgatggaattcaaggagccatttttgcttcaaccgaatttagtgacgaacaagaaacgcaacgttcagccgtccaggttggagatccttttgctgaaaaacaactaatggaagcgtgcctagaactgattcataaccattccgaatatctagtgggaattcaagatatgggagcagcggggttgatttcatcatctgcagaaatggctgctaaagctggatatggaatgcatttgaatttggacttagttccacaacgtgaagaagaaatgatcccttatgaattaatgctatctgaatctcaggaacggatgctgctctgcgtcaaacaaggatttgaacccgcagttgaagcactatttgctaaatacgagagcgaagcagtaaaaattggtgaagttactgccggtgaccgctatcaattaacctttaagggcgctcaagttgctgatgtaccagtgcatgctttggtggatgaagccccagtttaccatcaaccaagtcagaaacctcagcatatcagtgaaactaaaaagcaacagtatcaacctaaaattgaaaatttaactaaaaccttccaagcgatgttgcaacaacccacaattgcgcataaaggtgctatttttgaacggtatgactctcaagttcaaactaatacaatttcaacgacacaaagtgatgcggcagtggttcgtattcgaggaactcaaaaaactttggcgatgacgaccgatgctaatccgcgttatttgtatttagacccctattatggtggacaaatcgcggtcagtgaggccgctcgaaacatagttgctacaggtggaataccattggcaattaccgactgtttgaactttggtagccccgaagacccagaaagtttctatgaattagaacaggctactaaagggatgacggaggcttgtaaattatttgatacacccgtcatttcaggtaatgtctcactttataatgaatccaaccaacaacccatttatccaacaccaatggttggaatggttggcttaattgaaaatccagcttggataacaaccatagattttaaaaaatctggtgatttaatttatattttgggagaaacaacagcagaacttaatggtagtgaattacaaaaaatgcaactcggacatgttgaaggtccattatttaatttcgatttacgctatgaacaggagcaacaagaattgttgactcagttaattcacgcggaacttttgaatagtgcgcatgacttagccgaaggtggcttagccgttggtttagctgaatgcgcgttcgctagtgagttaggatgtaacgtcaagactaatttaacagctacagaactatttgccgaaaatcaggcccgctttattgtgacgattgctccagataaacaaaagatttttgaagcacaagtggcaaacagagcaactttaatcggccaagttgacggtaagcggatcaaaattgcaacgatggatgatgtaattgatgttgatttgaaaaatactaaggagagttggaagggagccctagcatggcagctgaattaaagggtctaaacgaagaatgcggtgtttttggtatttggaatgattcagaagctgcccaacggacctacttcggacttcacagcttacaacatcgaggccaagaaggtgctggcattgtcgttcgtaatcaagaaggacagttgaaaattcataaaggaaaggggcttttggcagatgtatttagatgtcccgatgatttggcacagctaattgggccgagtgcgattggtcatgtgcgctatggaacagctggaaaccgaggaattgaaaatatccaaccgttacttttccactacttacagggagatgtggcgatggcccataatggtaatttaaccaatgcagttagtttacgacgcgaattagaaaaaagtggggctacttttcaatctaattctgatacggaagtactaatgcatttaattcagcatcaaaaaggtccaacttttgttgaaaaattaaaagcgagtttaaaacaaattcaaggtggatttgcctacttaatccttaccaaagatgcactgtacgcggctcttgatccgaatggttttcggcccttagtaattggaaaattagctaacggttcatatgttgtagctagtgaaacctgtgctttagatgcagtcggagcaaccttggttcgaaatgttgaaccgggacagttagttcaaattgatcaccttgggcttcagattagtaattttactactaaaacccagttatcaatttgttcgatggaatacgtttattttgcacgacccgattcagatctttatggcgttaatgttcatctcgctcgtcaacggatgggtcaacgattggcaaaagaaaaccccattaaggtcgatatggtggtgggggtgccgaactcttcgttatcagcagcatctggagtggccgaacaactaggcgttcccaatgaaatgggattaattaaaaatcaatatagtagtaggacttttattcaaccgacccaagcactacgtgaacagggagtgaagatgaaattatctgcattaaaagcagtaattgcggggaaagatgtggcattagttgacgattcaatcgtgcggggtaccaccagtcagtatattgtgaaaatgttaaaaaatgcaggagctaagtcggtgcatttgatgataagttctccaccacttaaatatccatgtttttatggaattgatattgaacatacacgtgaattgatggctgctaattatacggtaagtgagatgtgtcagaaaattggagcagattcactgcattttttgagcctgccaggtttaattgaggcgattggtttacatcaagatgcacccaatgatggcttatgtgtagcgtattttgatggtaaatatcccacccccctttatgattatgaaaaagattttgagatccctaaaacagctaacgattttacattatcagcgatggcccaagtggaggaaaaataatggtagaaagtgcttatgaaaaagcaggtgtgaatattgcagctggtgaagaacttgtagctgatctaaagcaaaaattagatactccagaccctcatgctctaggcggacttggcagttttgctggatgttaccagttatcaaaagatcaattggatcagccggttttagtagcgggaagtgatggagtgggaaccaaagtgcttttagcggcccagtcaggtcaagttgaaacgattgggcaagatttggttgccatgtgtgtaaatgacttattggcgcaaggggcgttgccattattctttttagattatttagcactatcacatttagagaaaaatcaggttaaaaagattttaaacggaattttaaaagcctgccaggctcagtcaatcaccctgttaggcggagagacggccgaaatgcctggaatttatcagaaacatcattttgatttagcgggttttgctgtgggactaactgctaaacgtgatttactccaagcaaaaaatgtccacaatggagattatttaattggtcttccctccagtgggttacatagtaatggttattcgttagttcgtaaaattttatttgaagaccatgatttccagttcgatgatcagttggcaggattaaatggtagtttgattgaagaattgatgcaacctacccgtctttacgtcaacgtgatttggccacttttaaaacaaaaattggtcagcggaatcgctcatattaccggtggaggattattagataacgttccgcgaatgttacaagatcagcaacaggctgaatttaagttggatagttgggaaaagccggcaatttttaaaatcctagcggaacttggaaagctatcccagacagattgttatgaaacttttaacatggggatcggaatggtactagctgttagccccaacaattatgccagagtggtagcagaacttgaacaacagaaagaaacatattttaagattggtaaagtgaaaaaacgggagaaagatgcaccagtggtttatctttcgggagggagcagatgattaatattgcagtttttgcatcaggaacagggactaattttatggcattacaccaacatattcgagaaacaaaagttcccattaaaattgcatgcttaatttgtgatcaacccaatgcaccggttgttactaaagctgatgaattaggaattccagtctggacccatcatttgagagaatttgaagataaagtgagctatgaaaaggcgattttacgtgagctaaaaaaatataatttagcattaatcattttagctgggtacatgaagattgttaccaaagttttgttagaggcttatccacatgccattcttaatatccatccagcactgttaccatcgtttccagggcgccatggaattgaggatgcgtttgaatatggagtaaaaattactggagtaacgattcactggattgacggagggattgatactggcccgattattgctcagcaacctgtaccgattttacaaggggatgatgcggagcatttagctcaacgtattcatcaagttgaacatgatttatattttaaaagcatctgccaagtattaaaacagagaaagttgattaactaaggagagattaacccatgaaaactgcattactaagtgtgtcagataaaactggaatcgttgaatttgctagaggtttagttaaggcagattttagaatcgtatcaacgggtggaactaaaaaagttttggaagaggctggattatctattgttagtgttgaagctattactaactttccagaaatgttggacggacgagttaagacgctacatcctgccattcacggaggattgttagcgcgccgtgacttaccgaaacatttggcagccctcaaagaacataatattgatttgattgatctagtttgtgttaatctttatccgtttaaatcgactattatgcaaaatggagtgacggaagcagaagcaattgaacaaattgatattggcggtcctagtatgttacgctcagcggctaaaaattttgcatcagttttacccgtagttgatcctaaagattatcaaccagttttagctgcactagcccatcagacggacgatgttaaatttcggcgagcgttagctttgaaggtctttcagcatactgctgcttatgacactttgattgctcaatatcttggacaaaacggtgaaattttcccagatgaacttaccaagacttatactaaaaaacaagtaatgcgttatggcgaaaatagtcatcaaaaagcagccttttatgaagatgcgctacctgtaccattttcgattgctcaagctcaacaattgcacggcaaagcattgtcatacaataacattaaggatgctgatgccgctttaaaaatgagcgccgaatttaatcaaccagccgtggttgcggttaagcatatgaatccatgtgggattggattaggtcaaaatattgaagaagcttgggaccgcgcttatgaagcagactcgatgtcaatttttggtgggattatcgtcttaaatcgaccagtagatttagcgacagcagaaaaaatgcataaactttttcttgaaattattattgcacctagttttgaaaaggaggcttttacagttttagctcaaaaaaagaacttacggattatgacggtcgattttaatcaacatcaggatgctaaagaacttgaaacagtttcagtaatgggcggactcttggttcaagaacaggatacggtagttgaagtggcgactgacttcaaagtggtttctaaacgtcagccaacggaaagtgaacttaaggcaatggtatttggtcaaactgttgttaaacacgttaaaagtaatgcgattgtgattacaactgatcaacaaaccttggggattggtgcaggccaaatgaatcgaattggttcggttgaaattgcggttaaacaggctgaaggttcagctaattttaaaaatgcggtaatggcttcggatgcatttttccctatggaagattgtgttgaatatgctgctaaacatggaattaaagctatcgttgaacctggtggaagtatcaaagatcaagcttcaattgataaggcggatgagttaggaatttcattaatatttagtggacgtcgtcactttagacattaagcggaggtaccagatggcaaaagtacttgtggttggaaatggtgcaagggagcacgttcttggacgtcagctattgaaaagtaatcaagtagaaaaagtttactgtgcacccggaaatccagggatgttggaaagtggcattgaaattattcctattggcgtcacagattttgggaaattagttgagttcgcccggaaacaaggtattgatttgacggttgtcggaccagaacaacctctacagcaaggaattgtagattattttagtactgcggggttaacgatttttggaccgactcaagcagccgctaaactagaaagttctaaagaatttgctaaaaagattatgcaagaagcgggggtccccacggctagttatgttagctatcaagatgaagctaccgcaatcaaagggctagcaaaaaaaaattatccactggtaattaaatcggatggcttagcggctggaaaaggggtcgttattgctaaaagtcagaaggaagctacgacaacgattcataaaatgttgggtgaacatcaatttgatactaagtctattattatcgaagaatttttaacgggacaggaattttccttgatggcttttattcaagacgaacaaattattcccatgcctctatcgcaagatcacaaggcagcttatgatggtgacgaaggccccaatacaggtgggatgggagcgtatagtcccttgcagcattttccaagtgatttggttaatgaaggtgtggaaaaaattattcgtcctattattcgaacacttaaaaagaagaatattactttttgtgggattctatacgctggtctgataatgacagactccggtcctaaagtgattgaatttaatgtacggttgggtgatcctgaaacggtggtagtattaccgcagctacaaagtgatttatacgaaatgttgcagggattgctccaccaccaagtgccagtggttaaatggcaaaaagaccaggtttacttaggagtagtaattagttcgcaaacttatccgcaagcttcggcaaggggagttgaactagcagattttaattaccttccatccaatattacagttaattatgcgggcgttagttgcaatcgagacggccaattaattagtaatgggggacgaatcctatgtttgaccactggagcgagcaatattacgaaagctcaagcaatattgtacggatggttaaatcagcacccaattctgggcttacgttatcgaagtgatattggagataaagcaaaataaaaaataaccatggaagaacgatgacggcgacttaaaataattcgattccatggtttttttaactaaaaaattagtaacatttaatactatataaagtgtaaaacgttttaagtaagtgctataattaatcgtaagtgtggtatagatatagtaaagaagtaacgagataatgtttacttgtcattgagtaatttcccaaacaaactgaacagggtttgaagtcgtaaatatggatattatgctagttatacttgataaattaagaacgatcggtatatcagaagattggattcagatggtttggaagattaggacgatgacagagtaaagcaagattatttgatgaacattttaagtaatcggtttagtcatgattttaatgagcactaacttaagaaatgtggtttgtatacttcttttatgaaatttaatcgatacatcatttattggtttaatggaaattttgatagtgaaattacgacggatgagttaattaacttgtccgttttgtgagtagtatgttatctaaatatttttaatgtaagatatccaaataatgtatgaacttagagtacccagtaatattcagcttttaaaaaaagaagaaataaatttaatgttttgagagaagttataaaaatggttgttcaacatgatgaaatcaaaaaattattaaagggtaataacttagatagcactaacgaatggattgtctatggtaccaaaggtgaaaggggatattggattgcgttgagtgatcggggggttaccctgttgcctgttgctcagcaaggaaatctaactggggaaattatccccttcgataatcaaaaaattaaaagtattgccttaaaaaagagcattctatcgaataagctcataattgtggatactaaaaataaaaaacatgttctaaaagtagctactcgccatctgggaaataaacatcatcatgaagactttttaaaaattattgaaaaatataaaaaataaaaaaaacgattttaagtgtcgatgaggacattaactgttatcttagaatttttgtctcaattcggaagatatcatagttacttaaaatcgtttttttattttaatcatttaagttatagcgtaatttcatgtgagctgatcctaatgttaccatgtcaccaagtaatttagtttgacgggtaaaggattctgtagctagttgttcattagcttgttcaagaaattgagttgggttagtttggtgcttgattgcccgatcagtttcattttgaattcgacgataaataccagtggtttcaagttcgaaggtgttccgaagatcaacgtataagtcgtaatctgtatcacctaaaagagcggtagtacagctcagccaatacatgttgttcatatcaaatgtaccagttgcattcttatagacagctggtgtgtcggtgacatgagcgtaaaaaggaactaccgtgttgaacgtgttggctccgtatgcaagccagtgaatgccggcaatttctgctggaacatggtttcggatttgaaggatgtggacattatgattccgattgataccgattggacgaaagagggtcttttggtcctcagtaccgttaccatatggatcaaattccgtattttcaaagtgggagctcaaaacaaacttaacgtcttcaatagagatctttttgttagcatgacagataaaaggtaaatcttgctccatgggatcattttcaatctcagggttgaagtatttttggccataccaagtacggggattattgtaaacagtatctttaatagaagcactaccaaagatatgacggaaattataaccgtcaaaatcaggatttaagtgatattcatcaattaaatcttttaaatcagctgagcatagcgtgtcatcagattcaaaatcaaattgatcaatattcatacggttaggtgccacaacgtaggcgtcatctggtatacgaacggcagcccaatgatggccaccaatcgtctccaaccaccaaacttcttcgttatcagaaaaagcgataccattaggttcatatgttccaaatttttctaaaagagcgcctaagcgtttaacaccttcacgtgcgctgtgaatatatggaaggacgagagtaacaatgtcttcttcaccaattccattctctacgaaggggtccatacctaagacgcgtgaattagtagtgattgtctcggttgcagacatggcaatattttcactattaatccccgctgcgggccagattccgttagttaaaatggaatttggcattgatgtgtaactcaaaggctgatcaggaagcttgattttaacaccactgataacggcttggtaatcacgtggttgttcctcggggttaacgaccacgaaacgttgaggatcaagagcttcatgaccatcatcattacgggaaataatcgttgaaccatcaatagaagcatctttaccgaccaaaatggtcgtgcaagaacctttaattttcttattcatagattaaaaacctcctaaaaatttgttattttctattatagcgcttttaaattgtttttggtaacgaacaataaaacgttttaaaaataataatgttcgtatttttgttttaatgaaaaggttaatgtgctaaaatgttcgttgtagctatcttaataattacgtggagttggaggaaatatggaagatatacaaaaacaaggtgccaaaaatgttgaactatcaacatcaaagacgattttattagcttttcagcatttactggcaatgtatgccggggatatattggttccattattaattggggcggcgcttaagtttaatgcgcaacagatgacctatttaatctcagtagatattttcatgtgtggagttgccacttttttacaggttaaacgcactccactaactgggattgctttaccagttgttttaggatcagcagttgaatacttggcaccgatggagcacattggtaatacaatgggctgggggtatatgtatggtggagtaattgcagccggaatttttgtgtttttaattagcggattatttgctagtttaagaaaattttttccaatcgttgtgacgggctctttgattactttaattgggtttaccttaatccccgttgctttccagaacattggtggtggaaacgttgctgataaaaactttggaagttcttctaacttaattttaggatttttaacagctttagttattattttaattcaagtttttgcgcacggattcatcaaacgcatttcagttttgatcggaattatcgttggctcagtgatagcagtggtaatgggactaatcgatcctacaccaatcagccaagctcactggattcaaattccaatgcctttttattttgcaactcctaaatttgaatggtcctcaattttaaccatgctcttggcagcagtaacttgtatgattgaatcaacgggagtttactttgctttagcagatattaccaaacggaatctgacagccgatgatttaaaacgaggatatcgttcagaaggaattgcagccattttaggcgggatattcaataccttcccatattcaactttttcacagaatgtgggaattgtgcaattatctggaattaagaaattaaaaccaatttatttctctgctggaatgcttttgattttaggattgattcctaagtttagcgcgattgctacattaatcccgacatctgtattaggtggagcaatgttagtaatgtttgggatggtaggtgcccaaggaattaaaatgctagctaacgttaaaatgaccgttaataatttattggtaattgctgtatcgattggaattggtttaggtgtaactactcaaccaacgctcttccacattttaccaacctcagttcaaacaattttagataatgggatggtagtaggctgtatcacagcaattattatgaatattctattgaacggtaaccaagccgttgatggagaatagtttaatttaaaatatataattaaaaacaagagatgatactatttggtatggtctcttgttttattttctgagtataatggaagaaaaacgatggagcgggtctcatgaagttaaatgtcgagttgaaggaacattggactaacattatttcaaaagaagatgcaatcgaaattaagatttacgatggaactaaaccaccagttgttaaccattctggtattggaattttattatttaagggaaaagttaaaaatatttttcaagtagaaaaagagttaaaagtgaagggagatcgttgggatcgattaattttaatatctattcctgctaacttaaaactccatcatgtgttacaagggttcattcatgaggcaataaaaaataaagtgactttgccaaaacatttaaagaaagaaaagcttcccccagcagttcaagagttagtagatcggtttgttcaacaacagctttttatcattaatcgatttggctcggatcatgttttaatttcagaaaagtcaaaactaggagggaaacctagccaccgttggaataaaatggttagtcagattccattttatgtggataccaaagaatgtcaggcagaaattcaatgggtaaagcgaaatgaaatggtaattagggccggagcggtaatgaaacgcgaggttccattgaataaaaatggttcaattggatttgctgctaaaatgggacagaaaatccgagaagatcatcaacaatcttttaaagattctaaaaccacagaagatataatattaaaaagtgtcaacgaagtggggttgtttctgtattttgcgggaactaatagctggttagtcctgaaagatgctaaagggcaaacgattgacgcatggacacgggtgaactaaaaaagagctgtaaacgaagtattcgtttacagctctttttatagtttattatttaacttttggtgtttcagcgattgtttcagtcttgcctttagcaaattgttggatagcaacaacgcgttcttgacggcgacgacgttcgcgcttaccagaaactttacgtgcacgtgcaaatgaattgtatggtgacttcatggtgatcctcctcagaaaaaaataatcaattactattctatgatgaatggtagataaaagcaaataaatttattaaatggattggcggttcgcattgaatcgctggaccgttcgcattgcaattttaccaaaaatacgaattaaaattacttggattggcaattgaataatattactaatgatgcgagctgagttgtaataaacggccgctgctgcaccaaagtaaatggattgccaaatgaaatttaagcccatcgtaacaattagcatcactaagaggcgtgccacaataatccgccaccagtcgaatttacctgggtataggaatatcgattggattaaattagcaaccatagcactgatggcccaaatgggtaagtaaggtcccaccggattagaaaaataccccacggtatcactaactaatccaaagacaattcctgcccaaggtccaaatagcgcagacacaacggctgctggtatatattcgaaactaaccaaggtaaattgaggcgtcaaatggatggtggtataacgcgctaacacaacatccaatgctgccaacaaagccataatggttagatttcgcacagaaaaaacatttttgatactaaaaaaattcttcatgcaaatccctccagtctttagttggccgttttaacgaaaaggaaatagcatgaaaaacttcccaattcaacggcgagatgcggaatcgatatcgctgacaagcattcgtccaacaagcaactctccgtcttgttggcacttaacgcatcgattcctactccattgatagagctaagttcattataaccaacttaaaataaaaataaagagaatgaattcgttaattaatatgaaaaatcgtatataatggctttaatgatgtaataattatgccagatgaatgggagtacgtatgcgataccaatttaaaaataacttagaagaaattattagtgccaaaaaagtattacaaagatcagggatgagccagagattattgcaaagaatccaaaatgagggtcgcctgattgatgaaaacgaaaacgatgtagaatttagtgataaattaatgccttttgaaccaatttggattgaattgcctgatgaagaacaagatcaaaatgttgcaattagtgatggtccattagacattatttttgaagataaaaattggttattagttaataagcctgctggactaaccgcggtccctggtccaagtgatcgagaagatacattggtcaaccggattaaaggtcattggcaggccattgaatctaaaaatatgatgcctcatttagttacccgtttagatcgatttacgagtggaataactttagtcgcccgtcaccaagtttctaacagtttattaagtgaacaagttgcgcatcataaaattaaaaagatttatttagcgatggttgatggagtagttcaagctgaaaaaggaacatttaatcaaccgttagggttagcagccgatggaattcatcgagaagtacgggacgatggacagcaagccactactagttttaaagtgctcaaacgttttgaaaatcaaacgctggttcaagttcacttaaaaacaggaagaacccatcaaatccgagttcattttgcgaatgcaggtcaccctctagttggtgatcagttatacgatggaccaatggatagaggaattaaacggcaagctttgcacgcttcatcgatccgattttttgatccatttattgatgaaaaggttagttttacagcagaattaccagatgatttaaagcaaatcgggatggaagagtagcataattgcagtttcagataggagaacaaaatgacacaagaaaatgaatttgaagacgtagaaatgacgttaggcgaaccagaatttaatgcgatgttgatgcaaatgacgcatgaggtaaacgctagcaatgcgtcagaatataactttatgggtaatacaacccaagaagttggggaaaatgtatgggcagttccggcttatctaagtgacgaatatgcgctattctttctatatacagaaattgataccggcgattgggtcctagccttttccgaagcagatttaggtgaagggcagtttaatctaggaactccaatgacaacgggtgaaggcttaaacaaattattcgatcaagatcccgatcgtgccaaaatggtattgagttttgttaatgatatggaaaaagctggcgaaggtatgtggcgcatggtggaacaataaaattttacatttaaaaagagcggactatggggagcgaattaacgtaagtttcttctaagaagctctttttttgtaccaactttttgaatatatttttatgatataattaacttcgactaaaaagaaaggggcgacgcgatggcaacgattttgatcgtcgttttgctattggcttccattggagtagggtatggattgcgagccaaaaagcatagtgaaacattagcgcaagcccgcaaagcggcagaaaaaattattgaacatgaacggcaaaaaactaaagccgaagtggctgaatatgaaaaaaatagtgttcaagaaacccaacaatatcaagagaccattgaccaagaactcgcagatgatctacacgataatcaacgtaaagaggcgtggatcgaacaaagaatgaacttattgaaccaaaaaaagattgtgttaactaatcgagcggatgcattagctaaaaaaagacaaagcctattacaagaacgcgacaatgtacggacaactttaggcgaagctaaacaactaattactgatcgatggaataaacttcaggaagttgctgatttggaagagcaagcagcttcaaagttggttttgaaagaaactaaacaagatgcaattcgttctaaagatgagtttgttaacaacgctcaaaccgaattagaaagctcctgtgagcgtgaagctgaggatttgatagccttagctatggaacatagtgatgttccaagaggtcaagccgaaaatcaccgcagttttattgcagaaaatgctgaatatcttggtaaactgattggaaattcaggacagaatgtacgagcaattgaagcattaactggtgtagatattgtgattgacgaccaagaaaaagaggtcattcttaacggttatgacccagttcgtcgagcagtggccatggaaaccatggaaatgattaaaactgagaaacgagttgttccagatacaatcgaacggttggttaataaggctaataaagtaattgaccaacgtattcgccagtatggtgaagacgcggttcgagaattgaaattaaaatatgttgcgccggatttaatcaaatttattggtcgaatgcattaccggacgagttatggacaaaatattttagaacattctattgaaactgctaagctagcaggtatttttgctgttgagttaggtgaagacgctactttagcacgacgtgcgggtttactacatgatatcggtaaatctattgatcgcgatattgaagcgactcatgtggaattgggtgtggaattgaccacccaatatcgagagagtccagtgatagtgaatactattgcttctcaccatggggatgttgaagctcgatatgtaattgctaatttggttgaggcagcggatgccatttctggagctcgtcaaggtgctagaagtgaatcagtggctgactatatccaaagaattaagagcttagaagagattgctaacaaacatccagaagtcaaggaaagttatgctatccaagctggtcgtgaacttcgagtaattgttcaacctaaagagacagatgataagacgattcatagtttagctactaacgtaaagaatcaaattgaagaggatgttacttatcctggtcaggtgaaggtaacggttgttagaaagttagagattgtagaatacgtggagaaaaaacaagcatgagtgaagacaacaccgcacagttagaaaaaatcgatagttttgttaaagagaagcttcaagatgacttaaccgggcatgattatgctcatattcaacgagtggttaagatggctaaacgcttaattgatgatcgcactgaaaatgtaaatcagtttgtagttttcgctgcagggtatttgcatgacgtgattgatgaaaaattagttgagaatcaggccgttgctgaaaatgaagtagctcggtttctaagaagccttggagttagcgattttgatattgctcatattttcgatattatcacgcatatgtcattttctgataatttaggacagaaatataaattatccttggagggacagattgtccaagatgcggatcgtttggatgccatcggagcaattggcattgcccgtacattttattacgggggtgcacatggacatattttatatgatcccgaaatacaacctcgtgaaaaaatgacgcatgatgaatatcgtgacaataaaacggtaatcaatcatttttacgaaaaactttttaagcttaaagatgacatgaacacacctttagcacaaaaaattgcggtagaacggacggagtatatgaaaagcttcgtaaatgagtttaaaaaagaatggtaacagtgaatttagggggatttaggaatgttaaaagatactgataatatacccagagggtatgtgattgtatccgcagtcgttgttgttttacttgcactaggtgttaagttacaaaacacatttatgcaattttttgaccagttatttagtagtatcgttcaaggaacggctttttcttttcttgaaccaatcatgcgcttaattacgatgattgcagataccaagcttggtttaatttatgcaatcattattgcagtatatttgtggtttaaagaacagcaacgagtagatgctatctgggtcatttgtacaatgtttggtggcgctgtagtagcgtttattctaaaagaattggttaagcgtccgcgcccaactattgatcaaattattccagaaacaggttttagtatgcctagtgggcacacctttgaagcatttttagtgttagcttttatttacctttattttgtccgtccaattcagtctgatagtaagcggcgttgggcttttcgaggattgattctatggcaagtcttagtaatgtggtcacgaatttatatgggggctcattaccttactgatacggttacggcggtagctttaggcatagtgtggctatgggttgctttatggctttaccagatgctatatgattggattgccagctttgttgctccttcagggggacgacatcaacgacaacattaaaatattttacttaagggcctaatcttttaggttctttttttctgattatttcctgattgaaccggtccaaaacggcttttttggtaaagcggtttctaaaaaataatttgttttttggaagaaaaaccttttaattattaatctatcaatgttttagcgacctaaaacaaaatattaaagaaggtatctttttttttttgagcatgctataatgagcttgtgcttttggttaggtgcttttggtcagatcgtttcattttgaactatccccattactaccggctcaagctacaaattaaacaatgccgtctattactatatagattaggtttacaggaggatgttcataatggaacaaggtacagttaaatggtttaacgctgataaaggttttggttttattactcgcgaagatggtagtgacgtattcgttcacttctcagctatccaaggtgacggattcaagactcttgaagaaggccaagcagtttctttcgacgttgaagaaagcgaccgtggaccacaagcagttaacgtaaacaaaaactaatttaaattaaaatagttatgagagtagggagcttcggcaacctactctttttttatgcaaaacataaagatttagttaaatactattaattaattaggtataatgaattaattgaagaggaggccttgaagaatgattgaaactaaccaaatcgttattaatacttgcttactcgcaggtcgaattatgattgaaaatggctctgagatgtcacgagcagaagatacaatgaaaagaattgcgatgaattcaggtgttaataatttaaaaattttcgggacgattactggaattattgtttcaattccaaattcaatggactctcaggtggaagggattaatcggcgagcgattgacctagagaaagtttctgcggttaatactttttcaagacgctatgcggccaaagatattacgttagaagagttttacgaaaaactaaatactttggatgaggcgacgccatccttcccattttggcttcaagtgattggagcagccctagttagtggacctttaatgacagccttttctggaaatatggttgatttaggaattactactttgactggggcgttaggctatacgctattttattttgtaaatcggattttaaatattaaatatattagcgaattttttgcatcaattataatcggaattatagctgtattcgcagtgcgttggggatggggacattctatcgatgatattattattggatcagtgatgccgttagtaccgggggtgccactaactaatgctgttcgcgatattttaaatggtcacttggttagtggtccggctcgtggaattgaagctttattatcagcatgtgcaattggttttgggattgccttcgtatttcgttttttgtaaacaaaggagtaagagatgcaattactactagaattttttatggccggcattgccaccatcggcttcggaattattattaatatacctaaacgggctttaattgctgcaggtgccattggtggcgtgtcatggacgatttactgggcgatgctccaagtgcgcttaggcttagcgttaagtgctttaacagcgaccactgtcattgctttattaagtttatacgctgctaggcgaatgaaacttccgatgattatttttaatattcctggaattgtaccgctcgttccaggaggacaagcataccaaatgattcgaaactttgcgctttctaacagtgatatggcaacgcattttatgttagaagtaggagaaattgcagggtcgattggaatcggttttttaatggcagaatttatcgatcggttgcaacgtaaaattataattactttgaaggaacacaaacaacgtagcaaaagtaaaagtgctaataatactgaaaaagagtaggattaaaaaatgcccaaattaatttgggcattttttttatttctttttgaaagcgaatacaaaagttgcttgactttcattttatagagcgatttactagtagaaagagacatctaagttaacgaaattttagccatggtgacttgaaaaatttgagttataggagtgaaagtaaatgttattaggtagtattgaagctggtggaaccaagtttgtgtgcgcagttgggaacgaagattatcaggtgaaagatcaaattcaaattccaacaacgaccccggaagagacattgtcggccgttgtaaaatattttaaacaatttgatatagcagctttaagtattgcttcatttggtccgattgaaattcgaaaaacgtcgcctaagtatggatttattactacaactcctaaaccgggatggaaagatactgattttttgggttacatgaaaaaagaaattaatgttcccatggcttggacaaccgacgttaatgggtcggcctatggggagtatacaatgtcaacgctatttaacgaaaaaattaattcattagtttattatacgattggaacaggagttggtgcaggtgtggttatcgatgggcatttgattggtgggattggccatccagaaatgggacatgtccctttgaaacgtcgtcccgaagatcttgattttaagggtgtttgtccttatcatggtgattgcttagagggattggttgctggaccaacttttgaagcgcgattaggtaaaaagggtaaggatgtgcctttgacggataagacatgggatattttagcttattatattgctcaagcagctgtacaaagtacattaatattacgaccaaacaagattgtgtttggtggtggagttactaatgcaaccctcttagagaaagtgcgaaaagaatttgataaattacttaatggctatgtgactgtgccagatttggatcaatatatcacgatgcctcaagttaaaaataatgggtcagcgaatgtcggtaattttgcattggcagagaagctattaacggaataattataaaaagggcaatcccgatttaaaatcaggattgccctttgttctttaattaaagctttattgtccgtagtagttgtagttaccagtagcatttccttgcggatcagcttgtgatggagttgcaggagtgttatcagtggtagctccgttgttatctgcaccgcctgttgtgtcactagccggtgtctccaccgaagatgcgcttgtggttccgtaatcttcagtggaggagctagtagtgtctgaactgttagtatctgaattggtagtatcggtatcatcttcttcgccagtatagatactgcttaatccagttgtcccagtttctttagcagataaatcaagggctttacggatgaaattagtaacacgctgacgttcgctcttagaaactaattcataagaaccaccatcgatggtagtaccattaccttggaggtgagtagactttaaatgatgggtagcaactcgataattagtcgagagtgctaaaagttcattaaatgttaaatcagttttagtttgtttttgaagagaatttaagaaattttggtttaataaagccgtaattgaatcactcttacgtaaaatggccattaaaacttggcgttgacgagtttgacgaccatagtcaccgtttggatcggtataacgcatccgtgaataatccagtgctgccttaccatttagatgaatttttttacctttagtaacgtcggcatgtccatatttgaaggttaatttaggagtgatatcgattccaccaaccccgtcaacaatcttttctaagccacccatgttaattaagccgtaataatcaatgggaatatttagtagtttttcgacagctttgattgctgtaccggctccacctaaatcataagcagcgttaatcttggaaggagaataatttgagtaaccaggaatcgacataaccgtatcccgagggatgctagttaaagtcatttttttctttttaggattcaaggttgccacgataatggtatctgttcggccgcgataattacgcccgagggccccagtatcagtacctaaaagcaaaattgaaattggtttactttgctttaaggtagctgaaacatcacgtgatttttggattttagcactatcaaaaatcgaatctacagcatttttggcatcgtaccatttcttaaccccaaagatagccaatataacagcaataatggaaacgacaatgatggttttttttctacgaggtcgtttctttcgtggttttcggcgctggttttgtttattttgaccgttgtcaccattgttattattgtcatcaggtgtgtaattgaaccggtttctgctgaatcggcttgaattggatctgggtgattcagaattcatgcaacttatcctccgagttatactaaaaaattcaatcattaatatgataccaaattaatggattatctataactttgtttaagaaagtttaacaaatagtacacaaaaaattggtatatcgacattaataacgaacttatttcaattcatgcaaccaatccagcgccgtggttaaccaagtagcaatccgatgatcgacgtgatggttatcataggcggtagtttcatcggctagagccatcccatgagggccatgttggtaaagatgaagttctgttggaacctgcagagcttgaagggctaagaagtaatcaaccgcattttgggatggaactaactgatcatcggccgttgcccaaatgaaggttggggcattgtctttagtggcattttgatcagctgctaattgttgaggatgggtggtccatttagctaaagttttagtgtcaggaaaaccatcattaggagtaattacaggaaaacctaaaatggttgcaaaaggctgcaatgtagttgatgctaaatgggtttgtgaactaagccaggctgcattccagttattattaaaattgctgacgatatgaccgccaaccgagaagcccattaaaataatctgattaacgtcaacctgccatttttcagcgttttgatgcgtaatatccattgcttcggctaattcgattaagggagctggataaagtggctggacttcatcaactaaggagtaccttagaacggagacttggtaaccaaatgattccagacgtaaggcaactttttcagcttgagctaaatcgatgtgggtgtaggatccaccgggcacaaagattaaagatggacttttttgatcagttaaattgggcgatatatatgaaattaattcggcttttgatttagaattagtatgattaagtttagttttaacaatttccataatgttgactcctttttgagaattatatatttggttacattttaatctttttactgttattcaccaaagaaaaggtaaggaactacgaaatgaagtttaaattaagatattttttagaagatgattttagtaattatcaggcgttagctaataatcgaaagattgctaaatcagcggggatgaagattctgacaaacgcgtttgaacaatggatggcgtttaaagggatggttggacgtcaaggctttttagcaatcgtcaacgaagcagaccaagttgtgggcggaatttttatttttcagccagctgcagaagatatatatgaaataggatacttattgggtgaagagtattggaaccaaggtattatgtcaaaagcagtacattttgcaattaaaaacttgaaaaatcgaaataaacgagattttaaagtttttgctaatgtttgtattgacaactacgcctctcagcaagtactaaagcgcaatggttttaagcgtttagaaaagattaccacgggaatctctggttatgatcaatcctcacaaaaagagtatcgctacgaattaaatgtaaaattacttgaataattgaacagatttgttataatttgaatcacatcgaaagaagaggttgcctcaattattagtagatccggctagatgactaagcatcaatgacccgaattgaaaggaaaagaggccgaaatgactacatgcttattcatgtacgatttgggctctggttgaataagccagagactgtcgcaatgaaaattgcggagcgctatctacgatttgactaatgattttaaacagtctttttgtgcgtaggaatgctcacaaaaaggctttttattttgttttttgaaaatcaacagcgcctcttttattttataggaggttttcttatggcagaacaaggtggtagtcaggttaagcgtgccttaaagacgcgacatatttcaatgatttcactgggtggaagtattggtacaggattattcgtagccagtggatcggcaatctccactgcaggtcccggtggtgcattattagcttacgttgggatgggggtcatggtctatttcctcatgactagtttaggagaaatggcgacttatatgccggtttcgggttcgttttcaacgtacgcaactaaatacgttgatccagcctttggctttgcaatgggatggaattactggtttaactgggctattacggttgcagttgatattagtaccattgccttgattatgaaattctggtttccgcacgctccggggtggatctggagcctgttggcactagtgctagttttcttggtaaatgctttgacggttaaagcttttggtgagactgaatattggattgctttaattaagttagtcacggttattatatttttggtcgtaggagttttaaccattgtcggaattatgggaggtaaagccacatatttagaaaactttgtgtatcataaagccccatttgtgggtgggatccctgctattcttagtgttttcgttgtggctggtttctcgtttcaaggtacagaattgattggaattacagctggcgaatctgaaacacctgaaactagtgttccgaaggccattagccaagtattttggcgaattttactattttacatcttagcaatttttgtaattgcttgtatcattccttatacaagccctaatttattaggatcatcagcccgtgatgtttccattagtccatttacccttgtgttccgtcgggcaggactagcaggagcagctggggtaatgaatgcggttattttgacctcagtactatcctcagctaattcggggatgtatgcctcgactagaatgttatattcgctttcgaaacaaggatttgctgccaaaatttttggtaaaacttcgaagcgaggaatcccatacctggccttacttggtacaactatcgtaggattgctaacctttatttccagtattatgggacctaaaatttatatatggttagttgctgccagtggactgactggctttgtggcttgggtcggtattgcgattgctcattggcggttccgtcgggcttttattaaacaaggacatgacgtgtcagaacttagatatcgtgcaaaatggttcccatttggaccactctttgcctttgttctcagtattattgtgattgcgggacaagatattcattccattgctaatttcgattggcaagcaattgggattacgtacatggcaattccgctattcattgtgttgtatacctattataaaattagatataaaacgaagttaataccgctggaagaaatcgatttatcgcgtccagatatcacgaaagaataattttttcaagatattgttttggggtcgtttggtggtacaatatgtagtgctaaaaaacgaaaaaagaggtatttcttataatgattgctttatcaggcccaattggcgcaggaaagacaacacttacagaattattaacaagtcactgggaaagtgatgcttattacgaatcagtagatgataataaaattttgccacttttctacaaagatcctaaacgctatgcgttcttacttcaaatttactttttgaataaacgtatggatagtatcaagcaagctaatagcgatgctcgtagtgttatggaccgttcgatttatgaagattcacttttgttccatttaaacgctgatttaggacgagcaactaatacagaagtggatatttacgattcgttacttaaaaatatgatgcaagagttgccacgtctttcatataagaagaatcccgatttactagttcatattgatatttcgtttgatacaatgttaaaacggatcaaaaagcgcggtcgttcattcgaacaaatcgaaaatgatccatcattatacgaatactatcacgaactcaataagcgctatgttgcttggttcgatgattatgatcaaagtgctaaaattaaaattgacggtgataaatatgattttgtggaaaatccagaagctcgtcaaaaagttattcaactaattgatgaaaagattgccacaatttaattgatatctacccggcttttttgtagaattagtttataaattaatagagaaattaaaggcgtttaaagtaggttttcagagagatccgcatggtggaaaggattagccgaaactccggcgctagttaaaaggtgggtaatgccacacggtgattccgttatcgtcggattgagtgcaccgcttatataagcaggtgaacttgggtggtaccgcgaaaagagtctcttcgtcccaatgtggatagaggctctttttctatatttaaggaggatgtaattatgttagatttgaaaatgattcgtaatcatgtagaagatgtcaaagctaaattagcaactcggggcgtaaaacctgaagcaatcgacgatttattggctaaggataatgaacgccgtgaattgattgtaaagagtgaaaatttgaaaaagtttcgtaatgaagtgtctgatcaaatttcacaattaaaacgtaataaagaagacgctaacgataaaattcaagaaatgcgtaaagtgagccaagatattaaaggcttagacgaacaactggaaaatattgccgaagaagttgaaagcaaagctgctcatctacctaatctaccacatgaagatgtaccggttagtttaactgaagagggtagtgttgaacaacgtcgtaatggaacaccacggacttttgactttacgcctaaggctcactgggaaattggagaagaattaggaatcttagacttcgaacgagctgccaaagttgctggtagtcgttttgtatactacgttggggatggagctcgtcttgaacgagcagtttacaatttctttttagatcaaaataatgcagctggctttacagaagaaatcacaccttacatggttaacgatgcatcaatgtttggaactggtcaatttccaaagtttaaagaaacccatgccggttatgaagtaaaagatgaaggactaactttaattcctacagctgaagtacctttggtaaattactatcgagatgaaattcttgatgaagaccatctaccaatcaatgttacagcgttgtcacctgcttttcgttcagaagctggtagcgcaggtcgtgacacgcgtggtttaattcgaatgcatcaatttaataaggttgagatggtgaagattaccaagcctgaacaatcatggaatgaattggaacaattaactacccatgctgaaacccttcttcaaaaattaggattgccttaccgagtgattaccctaaccactggagatatgagttttacggcagccaagacttatgatcttgaagtgtggattcctgctcaagataagtaccgcgaaatttcaagttgttcaaactgtactgatttccaagctcgtcgcgcacatattcgtttccgcgatgaaaatggtaaattgcaatacgtacacaccctaaatggatctggtttggcggtcggacgtacagtagctgcaattttggaaaattatcaaaatgaagatggaacagtcaacgttccggaagctttagtaccttatatgcaagggacaactgtaattggtaaaaagtaaatagttatctaaaaataagagatcgcattgagatctcttatttttttatggaatccataaaggataagcctctgattagaaatgtttttcagtaaatatgggagaaaaagggtggtttaaagctattaaaaaaattaataaagaaaaattaaattttttttgcaaaagtgattgacataacggagttttatccgtattatatataaatgtgttcacgagagatttatggaggattagctcagttgggagagcatctgccttacaagcaggaggtcacaggttcgagccctgtatcctccattgagaagcgattctcaatggtctaataaaatagaattatttgcgggcgtggcggaactggcagacgcgcaagatttaggttcttgtatcgcaaggtgtgggggttcgaatcccttcgcccgcatatcgattttaagccgacttagctcagctggcagagcatctgtcttgtaaacagggggtcggaggttcgaatcctctagtcggcattttgcggaagtagttcagtggtagaacatcaccttgccatggtgggggtcgcgggttcgaatcccgtcttccgctttgtaccaaatttaatattttgcacccatagcgcaactggatagagtgtctgactacgaatcagaaggttgcaggttcgactcctgctgggtgcatcgcttaaaaaagtattaatcggatatgattaatgctttttttgttttctaaatcaccggtttaaatttgtgctagaatataatggttggcgggaagtagctcagcttggtagagcaccacgttcggggcgtgggggtcgcaagttcaaatcttgttttcccgattgagataggtcaagaataaacttattattgatgtttaattgatggtaagttttttttattttcttaaggttttgatagctttaagacggaataattaatattttttgcaattttctgtcagtctcgtataataatagtcaacattagtcagagtatagaaaggtggtcgttatgcaaggacagaatatttcagatataatcgagcggtatttaaaggaaatcttggctaattcagaggagattgaaattcgccgttctgaaattgccgatcaattcgatgtcgtaccatctcagattaattatgtaattaagactagattcaccattcaaaatggttacgtggttgaaagtaagcgtggtggcggtggatacattagaattgaaaaagttaaacttcttgacgatattgatgttttggattctttaatacgggtgattggagattcattgaatgaacgtgatgcgatttcaattctaggcagtttatatgaagactccgtactaagtaaacgagaagcgagcttattagcctcgaccctttccaaaagtactttaaatattggcgatcgtaatttagaagaacaaattagagcaaaagtgatgattggaattttgaatcatctcagatacgaatagtggagattagagaaagacaggtggaaaatggaaaatttatttacccctagtgcaagaaatgccttggttattgctcaagaacaagcaaaaagatttaaacaccccgcggtgggtactgaacacctgttgttagcattggcaattgagactaatggtgtagcgcgaagcgtcttaggacaattcaatgttacagaagtggacgttgctgaggaaattgagcaatttaccggctatggtaacttacgaacagtaaaagatgattatttaccatattcaccaaaagctagtgaaattttagtcaacgctcaagagcaggctaagcaattaaacgctattaaaattggaaccgaacatttattacttgctttagtgcaaaatgataatattttgtcttcaagaattttattggcgttggatacagatattgccgaggttcgcaaagttactttacgtaaattaggtgtaaatccagctactcaaaatcgacgtagtaagcaacgggctacaagtgctgaaggaaccccaactttagattcagttgcacgagacttgacggcgatggctgctgaaggaaaaattgatccagtggtggggcggacaaaagaagttcgtcgcgtaatccaaattttaagccgacggactaagaacaatccagtattgattggtgaaccaggagttggtaagacggcgattgccgaaggattagctcaaaagattatcgatcaagatgttccaactgatatgcaaaataaacgattaatgatgctagagatgggttctttagtggcgggaactaagtaccgtggtgaatttgaagatcgtttaaaaaaggtgattgaagaaattcgcaatgatggtcaagtgattgtctttattgatgagttacacacgttaattggagctggcggggctgagggagccattgacgcttctaatatcctaaaaccagctttagctcgtggtgagctacaaacgattggtgcaactactttaacagaataccaaaagtatatcgaagctgatgctgctttggaacgacgttttgctaaagtggaagttgatgaacctacggaagctgaagcagttcaaattttaagaggaattcgtcctaagtatgaagaacatcaccaagttaaaatttcagatgatgccattcaacaagcagttactttatcatcacgttatattgcagaccgttttcttcccgataaggccatcgatttaatcgatgaagcggctgctaaaattcgaatcgatgcctctgagaagcaagtgaaaaaagttactgatgaagatcgattagaaaaattacgaacagctaaagaagaagcgattgataatcaagatttcgaaaaggctgccgacatccgtaagaaagaaatgaagttacgccgtaagattgagcgtgctgaaaataacccagaaaccaatgaagctaaaaaagattataaattaattgaaaatggcgaagatattgcgcaaatcgtttcagattggactggtgtacctttaacgcagatgaaacaatctgagtcagatcgcttgattaatttagagaaaactttgcacgaacgagtaattggtcaagaagaagccgtttcgtcagtagctagagctattcgccgtgcgcgttcaggtttgaagagccctaagcgaccaattggttcttttatgttccttggtcctacaggggttggtaaaacagaactggctaagtctttagcagatattatgtttggttcggaagataatatgatcagaattgatatgtctgagtatatggaacgttacagcactagtcgtctagttggatcagcaccaggttatgtgggttacgacgagggtggacaattgactgaacaggttcgtcggaaaccatactcagttgttttatttgatgaagtagaaaaagctcatccagatgtctttaatttgttacttcaagtttttgatgatggttttctaactgattctaagggccgacgagttgattttagaaatactattatcattatgacgtctaacttgggagctacagcattgagggatgaaaaatcagtcggctttggtgctcaaaatgcagctgaagattaccatgctatggcagataaagtacgtgaagttttgaagcagagtttccgtcccgaattcctcaaccggattgacgaaaccattattttccattcattaacgaaacctgaactccatcaaatcgttaaattgatggctaaagatgtcattcagcggatgagtgagcaggaaattaatgccaagtttactcctagtgcaattgatgtggtggctgaagctggatttgatcctgaatatggagcacgtccattgcgtcgagcattacaaactaaggttgaagaccaattaagtgaattaatgttgtccggtgaagctaaggttggtgacgatattacgatcggagcgcgcaacggaaaaattaatttaaaagttaaaaataaaacattaataaaaaataaataatttaacattgcaagttgtttgacaaagcatatggcaaggaataaaatgtaatatgtatgttaaagcagggttaaatgagacagtgcgatctattgtccgcagtgttctagataaaaaagcaaaaatagtttcttatagaggactatttttggtttttttttgctaaaaaacaggtttcagtgcaaactgtaatcaaactgtaacatttaactcgtttagaaattggagaggtgaataacttggcaggacatttagttaagtatggtaaacatcgtacgcgccggagctatgcacgaattaaagaagtgcttgatctacctaatttgatcgagattcaatctgattcgtaccaatggttcttagacgaaggtctccgtgaaatgttcaatgacattatgccgattgaagattttgcaggtaaattatcacttgaattcgtcgattatcaactactagaaccaaagtacacggttgacgaagctcgtgaacatgaagcaaactattctgcgccattgcacgtaactttacgtttaacaaaccacgaaactggcgaaattaaatcacaagacgtattctttggtgatttcccattaatgacagaacaaggtactttcattattaatggagcagaacgtgttattgtttcacaattagttcgttcacctggtgtctattacaacttagatacagataaaaataatcgtaaaatttggggaacaaccgttattcctaaccgtggggcttggttagaatatgaaacagatgctaaagaaatttcttatgtacggattgatcgtactcgtaagattccaatgaccgaattagttcgtgcccttggatttggctctgatgaagaaatcatcgatatttttggtggttctgatagtttagatttcactcttgataaagatgttcataagaatcccgaagattcacgggttgctgaatcattgaaggatatttatgaacgtttgcgtcctggtgaacctaagactgcagatagttcaagaagtttgctaactgcgcgcttctttgatccaaaacgttacgacatggctccagtaggtcgttacaaagtaaataaaaaacttagccttaagactcgtcttttaggtcaaaccctagctgaaacattagctgatcctgatacaggggaagttattgctcaaaagggtgaaatggtcaacaaagacgtaatgaagaaattagcagttttccttgatcgtcctgacttcaagatggttacataccaaccatctgaagaagcagtcgttactgaaccaatgactatccaagttatcaaagttcaagaccctaacgacccagaacgtacattgaatatgattggtaatggtaatatcgatgctaaattgaagcacatcacacctgctgatattatcgcttcaatgaattacttcttccttcttcaagatggaattggtagtacagatgatattgatcatttgggtaaccgtcgaatccgttcagttggtgaactacttcaaaaccaattccgcattggtttatcacgtatggaacgtgtagtacgtgaacgtatgtcaatccaagatgctgaaacagttacaccacaacaattgattaacattcgtccagtagttgctgcaactaaagaattctttggttcttcacaattgtcacaattcatggatcagactaacccgcttggtgaattatcacataagcgtcgtctatcagcacttggacccggtggcttgactcgtgatcgtgccggatatgaagttcgagacgttcactatacgcattatggtcgtatgtgtccgattgaaactcctgaaggccctaacattggtttgattaataacttggcttcatatggtaagatcaaccgatatggctttatcgaaacaccatatcgtcgtgtttcatgggaagatcataaagttacagatcgtattgattacttaactgctgacgaagaagatcaatttgttattgctcaggctaactctccacttaatgatgatggttcatttgctgacgacgtagttatggctcgtcatgaaagtgataacatcgaaactagcattgaaaatgtcgattacatggacgtttctcctaagcaagtagttgctgttgctacagcatgtattcctttcttggaaaacgatgattctaaccgtgccttgatgggtgctaatatgcaacgtcaggccgttccattggttgatccacattctccattaattggtactggtattgaatataaagctgcacatgattctggggttgctcttttatgtcaacacgctggtgtagttgaatatgttgatgcacgtgaagtacgtgtccgtcgtgatgatggcgcacttgatacttacaagctcatgaagttccgccgttcaaatggtggtaagaactacaaccaacgcccaattgttcgagttaatgataaagttgacgcggatgaagtactagctgatggtccatcaatggaacaaggtgaattagcccttggacaaaacccattgattgccttcatgacatggcaaggttataacttcgaagatgcgattgcgattaatgaacgtttagttcgtgatgacgtatatacatcaattcatatcgaagaatatgaatcagaagcacgtgatacaaaacttggacctgaagaaatgactcgtgaaattcctaatattggtgaagatgcccttcgcaatcttgatcaagatggtattgttcgagttggtgctgaagttgaagatggtgacatcttggttggtaaggttactcctaagggggttacagaattatctgctgaagagcgcttgcttcatgctattttcggtgaaaaagctcgtgaagttcgtgatacatcactccgtgttccacatggtggcggcggaatcgttcaagacgttaagattttcacccgtgaaaatggtgacgaattatcacctggtgtaaacatgatggttcgtgtttatatcgctcaaaagcgtaaactccaagttggtgataagatggccggacgtcatggtaataaaggtactgtttcagtggttatcccacaagaagatatgccttacatgcctgatggaactccaattgacattatgcttagcccaatgggtgtgccttctcgtatgaatatcggacaagttcttgaacttcatttgggaatggctgcacgtaacttaggtatccacatgacaactcctgtttttgatggagcccaagataaagatatttgggaagcagttgctgaagctggtatggattctgatgctaagtctgtgctttatgatggacgtactggtgaaccatttgaacaacgtgtggctgttggtgtcatgcactatatgaaacttgctcacatggttgatgataagattcatgctcgttcaattggaccttactcacttgttacacaacaaccacttggtggtaaagcacaatttggtggacagcgttttggtgaaatggaagtttgggctcttgaagcttacggtgctgcatatactcttcaagaaatccttacttacaagtctgatgacgtcgttggtcgagttaagacatacgaagcgatcgttaagggtgaaccaattccacgcccaggtgttccagaatcattccgagttcttgttaaagaattacaagctttaggacttgatatgaaggttctaggtggggatgaccaagaagttgaacttcgtgatatggacgaagaagatgacgatgttgtgaatgtcgatgctcttagcaagtatgctgaaaagcaaaacgaaaaaacaaatgctagcactgaagaagcaaaggctccatcaacggaatcagctcctgttgaaactaaaaacaatcaaaactaattacttaaaagaaagaggaggtcagtccgttgatcgatgttaataaattcgaaagtatgcaaatcggtttagcttctcctgataagatccgtatgtggtcatatggtgaagttaaaaaacctgaaaccattaactatcgaactttaaaaccagaaaaagatggattattcgacgaacgaatctttggaccaaccaaagattacgaatgtgcttgtggaaagtacaaacgtatccgttataagggaatcgtctgtgatcgttgtggtgttgaagttacaaaatctaaggttcgtcgtgaacgtatgggtcatatcgaacttgctgcaccagtaacacacatctggtacttcaagggaatccctagtcgtatgggactagttcttgatatgagtcctcgctcattggaagaaatcatctattttgcttcatacgttgttatcgatgctggtgaaactccactagaaaagaaacaactattaactgaacgcgaatatcgtaataagttaagtgaatatggtgataaatttgtagctaaaattggtggggaagctatccaagctttacttgaaacagtagatcttgaaaaagaagctaaccaattgaaagaagaattgaaggaagcttctggtcaaaagcgtacccgtgcggttcgtcgtctagacattattgaagccttccttaaatctggtaaccacccagaatggatggtactcgatgctattccagtcattccacctgatttacgtccgatggttcaattggatggtggtcgttttgctacatcagatttgaatgatttatatcgtcgtgtaattaaccgtaacaaccgtttgaaacgattgttagatttaaatgcacctggaattattgttcaaaacgaaaagcggatgcttcaagaagcggttgacgctttgattgataatggtcgtcgtggtcgtccggttgctggacctggtaaccgtcctttgaagtcattgtcacacatgcttaaaggtaagcaaggacgtttccgtcaaaacttgctgggtaaacgtgttgattattctggacgttcagttattgatgttggtccttcattgaagatgaaccaaatgggtcttccagttccaatggcaatggaattattcaagccatttattatgaaggaactcgttggtcgtggcttagcttctaacatcaagaacgctaaacgtaaaattgatcgtaaagatgatgatgtttatgatgtccttgaagatgttatcaaagaacatccagttcttttgaaccgtgcccctacacttcatagacttgggattcaagcttttgaacccgttctagtaagtggtaaggccatgcgtttacatccattagcttgtgaagcttacaatgccgattttgatggggaccaaatggctattcatttacctttatcaaatgaagctcaagctgaagcccgtcttttgatgttagctgctcaccatatccttgctcctaaggatggtaagccagttgttactccatctcaagatatggttattggtaactattggttaacaatggaacgagctgaaagtgtcggtgaaggcatgatcttcaacggccttgatgaagttcgtttagctcttcaaaatggttatgtttcaattcatacaagaattggtgttcgtgctaattcaatgcctgaaaagccatttactgatgcacaacgtaaacaaattttgattactactgttggtaaaatgttattcaatgacattcttcctaagggctttgtttacttgaatgctccaactaatgaaaacttggttagtggtacaccggatgaatacttcctcgaaagtggcgaagacatccgtgtacaactaaatcaacgaccattaattgcaccattcaaatctggattcttgagtgacgttatcgctgaagtttacaagcaatataaagttactgaaacttcattattacttgatcgaatgaaagacttaggattctatcgctcaaccctttcaggtttaactgtgggtattgcagatattactaacttgcctgaaaagccagaaattattgctgcagctcataaacaagttgctactgttacaaagcaattccgtcgtggacttattactgatgacgaacgttatgaacgggtaattggaatttggaacgatgctaaagatgacatccaacaaagactgatggaaacatttgatccacaaaacccaatcttcatgatgtctgattctggtgcgcgtggtaatatttctaactttactcagcttgctggtatgcgtggtttgatggccgctcctaatggtaaaatcatggaacttccaattctttctaacttccgtgaaggacttagtgttttggaaatgtttatttctactcatggtgctcgtaaaggtatgaccgataccgccttgaagaccgctaactctggttacttgactcgtcgtcttgttgatgttgctcaagatgttatcgttcgtgaaaaagattgtggaactgatcgtggattattgatttcagcaattgctgaaggtaatgaaatgattgaaccactttatgatcgaatcttaggtcgttacacaatgaaatctgttttcaatcctgaaaatggtgaaaccatcattggaccaaatgagatgattaacgaagctatagcacaacaaatcattgaagccggcgttcaagaagtaactattcgttcagcatttacatgtaacactgcgcatggtgtttgtgagaagtgttatggacgtaatatggctactggtgaccgtgttgaagttggtgaagcagttggtactgttgctgctcaatcaattggtgaacctggtactcagcttactatgcgtaacttccatactggtggtgtggctggtaatgccgatatcactcaaggtcttccacgtatccaagaaattgttgaatctcgtaatcctaaaggaccagccgagatttcagaagttactggtacagtcgaagctattgaagaagatcctgctgaaggtacaaaggatattacgattaagggtgaaaccgatactcgtacttacacattaccaatcacggctcgtatgaaggttgcagaaggtgactacatccaccgtggttcagcattgaacgaaggttcaatcgatcctaaggaattaatcaaagttcgcgacgttctttctactgaaaattacttgctaagtgaaattcaaaaagtttaccgtatgcaaggtattgaaatcagtgataagcacgttgaaatcatgattcgtcaaatgcttcgtaaggttcgggtaatggatcctggtgatactgacattcttccaggtacattaatggatattaatgactttaagaatgataactacaagaccttgattgctggtggtattcctgccacatcacgtcctgtaattcttggtattactaaggctgctcttgaaacaaatagtttcttgtcagctgcttcattccaggaaacaactcgagttcttactgatgctgctattcgtggtaagaatgacccacttgttggtttgaaggaaaatgttatcattggtaagattattcctgcaggcactggtatgacggattatcgtcaaatcaagcctgaagttgtgggcggaaacgttgaacaacctcaatcattaagtgacgttgaaaaagaaatgaatgaaactgttgaataatagtttttagataaaaagctcaccaaattgtggataacacagtttggtgagcttttttattatggtaattttaagaaacgcgatgaattaatagttggttttagctgcttgcgctagctcatcgaatttatcaaagaagagagcggaatttacttgagtaacgaaggttaaaggacgtccgttatcagtaacaaaagtttttccagccgagggaccatcggtgataacagcagctttaattggtttactatcaactaattcaggatatttacttacaagagtagttagaacatcccataaataataagttgagttagcttcaaaagagtgaactagagaataaccttgaccaattaaatctaaagcagggaattggcgctgcttagcccaacgaatacgtaaagctttagtcaagggaacttggttagtactatctaaactaacaatggtaatctttaggtccgtatcaaagacggttttgacagcttgaggatcccagtatgcattccattcagctgtaccatcatgttcgggttcagcaacattaccaaccccgttcattgatccacccatccaaaatagttcatcgatattgtccacaattgtaggatcgatttcgatggcacgagccagatcagttaatggaccagtcataatcaaagtcaccttctgctgagaagctttaatcttctctaacatatctaaatgagctggttgagatgccaatttagttttaggttgattattgttatccaagtgttcgtttaaaatgggaaaatcatcaaatgaaaaagcgctgagacgccattcttttgggaattgatttactgggcgtgaattagatttagcaacttctagggtagtatcttgaccaaaaagatcaatgatttttctagatgctgaaacggcaggttctacataggaatctgctccaactgcccccactccaattaactttgtatctggaaattccaatagtagaagtaaagatacaagatcgtcgacattaccatcatgattaaaataaatattttgcaatgtaggacctcccaaatttattaaagtaatgatagcataaagttcgtatgttgtgtttataaaatgatttttgcgaagtatattaatgatttttactaaaatacaaacattaataaataatatgcagtgaaaaggtatggaataaaaggaattatgctttttttagtaaaaaatagtacggttgctccaagggtagcagcaatcaaaataatgagggtagtcaaatgggcaccaactaataaagtgaaaaataataagatttctatatcgccttgtcctattttttgaaagcaagctaggtgttctaaattattgaataataaaaacgttaatatgagtaaaatagcgaagtttaaccaagaaaaattaaatttgaccaataagtaggctggaaaaattaaaatatgcgtgctaactgattgaacggctacatcctccacggctaggtaactgaggataaaaaagcaaataaaactaaatggtgttggcgaagtggtaggcacgatcgttaaaaagaataaggctgacaatatttcaagcatcacggagtaggtaggaatcgatacgtcgcaaaaaatgcatcgccctcggcaactccaataactaacaattggaaataagcaataatatggcagtggagtagaacagtttgaacagtgggagggcggaaaaatgatggattgaccgactaaacggcgttcataaagcactagaagaaatgatccccaactggcacctagaattcctataagtaaataataaaataagagcatgttatttctccttaacttaatgattggtattagataatatacgaaatagcgctccgtttttttgcttaatttacttgcattcataaaaattgcgtgatattctatttaaggtgctttttgtggacaggttttctgcaaatgcagacatgctgactggaaacgttagccctggtacaagtctcggccgtctttttttatatcaaaaaaagaaccgcctggatatgtgtacttaaagaatacttatttattttcatatattggaaggagaaacatcgatgcctacaattaaccaattggttcgtaagggtcgtcgttcacaaagctcgaagtcaaaagctccagctttgaactacggctataacagcatgaagaagtctcaagttaacaacccagctcctcaaaaacgtggagttgctacacgtgttggtacaatgacacctaagaagcctaactcagctttacgtaagtacgctcgtgtacgtttgtcaaacttgattgaagttacagcttatattcctggtattggtcacaaccttcaagaacatagtgttgtcttgatccgtggtggtcgtgtaaaggatttacctggtgttcgttaccatgtcattcgtggtgcgcttgatacagcaggtgttactgatcgtaaacaaagccgttctaaatacggtacaaagaaacctaagaagtaaggaggttgtgtataaatgccaagaaaaggtccagcaccaaaacgcgaagtattaccagatccaatttataactcaaagcttgttacacgtttaatcaaccgtttaatgttagatggtaagcgtggtaaagcttcaaagattttatacaatgcttttgatattatcgaaaaagaaactggttcagaaccaacaggagttttcgaagaagctatgaacaacatcatgcctgtccttgaagttaaggctcgtcgtgttggtggctctaactaccaagttccaattgaagtacgtccagatcgtcgtacaacacttggtttacgttggttagttaactacgctcgtctccgtggtgaacacacaatgccagaacgtcttgctcgtgaaattatggatgcagctaacaatactggtgcatctgttaagaaacgtgaagacacacataagatggctgaagccaaccgtgcattcgcacattaccgttggtaagattcagtcgttgcaattaatcattgcaaccatgatgactattatatggatgcatatagtagtcattttttctaaaaacagctattactttgatttcatttggaaggagaaccttttatataatggctaacaaacgtgagtttcctctagaaagaactcgtaatatcggtatcatggctcatattgatgctggtaaaacaacaactacagaacgtatcttgtactatacaggtaagatccacaagattggtgaaacacatgaaggtgcttcacaaatggactggatggcccaagaacaagaacgtggtattacaattacatctgctgcaacaacagcagcatggaagaaccaccgtatcaatatcatcgatacaccaggacacgttgatttcacaatcgaagttgaacgttcactccgtgtgcttgatggtgccgtagcggttcttgatgctcaagctggtgttgaacctcaaacagaaactgtttggcgtcaagcttcagattatgatgttccacggatcgtttttgctaacaagatggataagcttggtgctgattttgatttctcagttcaatcaatccacgaccgtttgcaagctaacgctttgccaattcaaatgccaatcggtgctgaagatgatttccaaggaattattgacttggttgaaatgaaggctgatttgtatgacgttgatgaattaggtacagaatgggaaactgttgatgttcctgatgaatacaaagaagaggctgaaaagcgtcgtaacgaaatgattgaacaattggctgatattgatgaaaacatcatggaaaaataccttggtggagaagatatctcagttgctgaaatcaaagctgctattcgtaaaggtactttagctcttgaattattcccagttcttgctggttcagcatttaagaacaagggtgttcaaatgatgcttgatgccgttgttgattatttaccatcaccattggatgttaagccttatagtgctacagatccagaaactggcgaccaagttgaattgattgctggtgatgacaagtcattcgctgctttagcatttaaagttgctactgacccattcgttggtcgtttaacatttatccgtgtataccaaggtacattggaatcaggatcatatgttcttaacgccacaaagggcaagcgtgaacgtgttggtcgtttgctacaaatgcattccaaccaacgtcaagaaatcccagaagtattctctggagatatcgctgctgctatcggtcttaagaacactacaactggtgattcattgactgatccagcacatccattacaattggaatcaatggtattcccagatccagttatcgaagttgctgttgaacctaagtcaaaagctgaccaagataagatggatatcgctcttcaaaaacttgctgaagaagacccttcattccgtgcagaaacaaaccctgaaacaggtgaaactgttattgccggaatgggtgaacttcaccttgatatcattgttgaccgtatgaaacgtgaatttaacgttgaagctacaattggtgctcctcaagtatcataccgtgaagcatttactaagaagacttccgcacaaggtaaatttgtacgtcagtctggtggtaaaggtcaatatggtgacgtttgggttgaattcgaaccaaacgaagaaggtaaaggctttgaattcgaagatgccatcgttggtggtgtagttcctcgtgaatacattccatcagttgaagaaggtttgagagaagctatgaacaatggtgttcttgccggatatccattggttgatgttaaggctaaactatatgatggtagttatcatgatgtcgattctagtgaagctgcatttaaggtggctgcatcacttgctttacgtgctgctgctaagactgctgctcctgttatcctagaaccaattatgaaggtagaaatccgtgttcctgaagaatacatgggtgatatcatgggacaagttactgcacgtcgtggacgcgttgatggtatggaagcaattgctggtgctgaagaaatccatgcatttgttcctctatcagaaatgttcggttatgctacaacacttcgttcagcatcacaaggtcgtggtacatttactatgacatttgatcattacgaagctgttccaaaatcaattcaagaagaaattatcaagaaaaatggcggacatgctgaataatctttaaaattaaagaagttttcttttttcaattatttaattgaaggagaaaacttctttttattttaaatttatttctcaaaacccttgtcataacgctgattatcatgtattattatcaagtaccgttttcaaacgagggagcattatgctctctaaacggtggtgtataagcatagcgttgatgtgaaaggttgcgacacacccggccgctttgccacagggtgtggcggtaattttcacggagcaagtcttatttttaaaatagacgaaggaggtaacacaatggcaaaacaaaaaattcgtatccgcctaaaggcatacgaacaccgtatcttagatcaatctgctgacaagattgttgaaacagcaaaacgtactggtgcaacaatttcgggtccaatcccattgccaacagaacgcacagtatatactgttttgagttctccacataagtttaagaaggctcgtgaacagttcgaaatgcgtacgcacaaacgattgatcgatatcgttaacccaacaccaaagacagtggattcattgatgaagcttgacttgccaagtggtgtagatatcgaaatcaaactataatttaaagtataaacggaggtgtactaatgaccacaaaaggaatcttaggtaaaaaggtcggaatgacacaggtttttactgaagctggagaattaattcctgttacagtaatcgatacaactcctaacgttgtattacaactcaagacagttgaaaatgatggttattcatcagttcaattagggtttgacgacaaacgtcaagttttgagcaacaaacctgaacaaggccacgtagcaaaagcaaatacaaatcctaagcgcttcattcacgaaatcagaaatgttgagcttggggacgtcaaagttggagacacaatcgcagctgacatttttgaagcaggcgaaatcgtcgacgtaactggtactactaagggacatggtttccaaggtgttatcaaaaaagacggtcaacgtcgtggtccgatggcgcacggttctcgttatcaccgtcgtcctggttcacttggggcagttattaaccgcgtattcccaggaaagaaattaccaggtcgcatgggtaacaaaacagtaacaattcaacatcttgaaatcgttaaagcagatacagaaaacaacgtattactagttaagggtaacgtacctggcgctaagaagtcatacttagttgttaaaagtactgtaaagaatactaaataagagaggaggaccatataaatggctaacgtatcaatattcaaacaagacggaactaaaaatggtgacgttgaattaaatgccgatattttcggtatcgaacctaacaacgatgtagtctttgaagcagtagttatgcaacgtgcatctatgcgtcaaggtacacacgcagtaaagaatcgtagtgctgtacgtggtggtggtagaaaaccatggcgtcaaaaaggtactggacgtgctcgtcaaggttcaattcgctcaccacaatggcgtggcggaggaattgtctttggaccaactcctcgttcatatgcatacagcattcctaagaaaatgcgtcgcttggcattgaagtcagtactttcacaaaaggtattggatgaaagccttgtagtcgttgatgaattcaagttcgaaactccaaagactaaggactttgctcaatcattaggtaaccttaatgttgataaaaaagctctattagttcttgaagaagataacgaaagtgctgtattggctgctcgtaatttatctaatgtaaaaatcgttgaacctgaaggtatcaatgttttagatattatgaatagcgacaaacttgtcattacacaaaaggctctttctcaagtagaggaggctctagcataatggaatcacgtgatattattctacgccctgttgttacagaagcatcaatggcgttaatcgatgacaaacgttacacatttgatgtagatccacgtgctacaaagactcaagttaaaaaagctatcgaagagatctttgaagttacagttattaagatcaacattatgaatgttaaaggtaagttgaagcgccaaggccgttacgctggttacacaaagaagcgtcgtaaggcaatcgtgcaactttctgcagattcaaaagaaatccaattatttggtgaagaataaataaatataggaggaaaacaacgtggggattaagaaatttaaaccaactacaaatgcccgtcgtggcatgacacaattggactactctgaaatcacaaagaagagtccagaaaagtcattgttggaatctcaaagccatactgctggtcgtaataactacggtcgtatgactgttcgccatcgtggtggtggtaacaaacgtcaataccgtatcatcgactttaagcgtattaaagatgatgtaccagctacagtaaaagctattgaatatgatccaaaccgtacagctaacattgctttgcttgtttatgctgatggtgttaagtcatatatcattgctcctaaaggtttgaagattggcgacaaggttcaatctggatcagaagctgatatcaaagtaggtaacgcattaccacttaaggatattcctgttggtactgttatccacaatatcgaattaaaaccaggtaaaggtggacaacttgttcgttcagctggtgcttcagcacaattacttggtaaagaaggtaagtatgtacttatccgtcttgcttcttctgaagttcgtatggttcttgcaacaaaccgtgcaacaatcggtgctgttggtaatgaagaacatgaactagttaacgttggtaaagctggtcgtacacgttacgctggtcaacgtccacatgttcgtggttctgtaatgaaccctaacgatcatccacatggtggtggtgaaggtaaggctcctatcggtcgtccatctcctctttctccatggggtaagaaaacaatcggtaagaagactcgtaacaaacataacaagtcaaacaaatttatcgttcgtggtcgtaagcgcggtcgcttaggtaacatctagaacagttttcgaaggaggtcaaattaatgggtcgtagtttaaaaaagggaccattcgctgatgaacatcttctaaagaaggtcgatgcacaaaaagatcaagacaagaagccagtaatcaagacatggtcacgtcgttcaacaatttttccaagtttcatcggatgcacaatcgctgtatacgatggtagaaaacatgttccagtttatatccaagatgatatggttggtcataagcttggcgaatttgttccaactcgcacattccgtggtcacggtggcgacgacaaaaagacatctggaaagtaaggaggatgaatcatggctgaacaagtaacatctgcacaggcaactgcaaagactgttcgtattgccgctcgtaagattcgtctcgtagtcgatcttatcagaggtaaaagtgtcgctgaagcttttgcaattttaaaatttacaccacgtagtgcttcacctgttgttgaaaaggttttgaagtctgcagtggcgaatgctgaaaacaactttgatttggatcgtgaagatttggtaattagcaaagtctttgttaacgaaggaccaacgttaaaacgtttccgtccacgtgctaagggttctgcatcaccaattaacaaacgtacaagtcatattacagttgtagtatcagaaaaacaggagggataacgcgtgggtcaaaaagtaaatcctaatggattccgtgttggtgtcattcgtgattggcaagctaaatggtatgctgataaagacttttcaaagttcttagccgaagatatcaagattcgtgaatttatcgcaaagcaacttactgatgcttctgtatctactgttgaaattgaacgtgcagcaaatcgtgttaacatttcaattcacactgctaaaccaggtatggttatcggtaaaggtggatcagaagttgaaaagttgcgtaatcaactaaatcaattaactggcaaacgtgttcacatcaacattgtcgaaatcaagaaacctgatctcgaagcaaaacttgttggtgaaaacatcgctgctcaactagaaggacgtgttgcattccgtcgtgctatgaagcaagcaatgcaacgctcaatgcgctcaggtgctaaaggtattaaaacacaagttgcaggtcgtttaaacggtgctgacatgtctcgtgtagaacgctactcagaaggaaaggttcctcttcacacacttcgtgctgacgtggactacgcttgggttgaagctcgtactacatacggacaacttggtgttaagacatggatctaccgtggcgaaattttacctgaagtaaaggacgctaagaaaaactctaaagaacaaggagggaaataagcatgttagtacctaagagagtaaagcatcgtcgcgaacatcgtggtcgtatgcgtggtgctgctaaaggtggcaaaacagttgcttttggtgaatatggtttacaagcattaacttcatcatggattactaaccgccaaatcgaagctgctcgtgtggctatgacacgttatatgaaacgtggcggtaaagtttggattaagattttccctcataagtcatacacatctaaaggtgtgggtgttcgtatgggtaatggtaaaggtactccagaaggctgggttgcaccagtaaaacgcgaaaaggttatgtttgaagttgcaggtgttcctgaagaagttgctcgcgaagctctacgtttggcagcaatgaaacttcctgttaagacaaagattatccaacgcgaggaagtaggtggcgaatcagatgaaggctaaagaaattaatgaattaaccactgacgaaatgatcaataaggaaaaagagtataaggacgagttattcaacctacgtttccaattggctacaggtcaacttgaaaacactgctcgccttaaagctgttcgtaagaacattgctcgaatcaaaactgctctacgtcaacaagaattaaacaagtaaaagaatacgaagggaggacttaatcaatgagtgaagaacgtaacgcacgaaaggtttaccaaggacgcgtagtttctgacaagatggataagactatcacagtccaaatcgatacttacaagacacatcctgtttacggtaagcgtgtaaagtactcaaagaaatataaggcacatgatgaaaacaacgctgctaagatgggcgatatcgtaacaattatggaaacaagacctttatctgctacaaagagattccgtttgcttgatatcgttgaaaaagcggttattatctagctcatgtttcgtattctgatacaaaattgaagggaggacactaactgtgatccaacaagagagtcgtttgaaagttgctgacaattctggagcacgtgaactgttggttattaaagtattgggtggttcccgtgttaaatttggttacattggtgacattatcgttgctactgttaaacaagcaacaccaggtggcgttgtcaaaaaaggtgacgttgtaaaagctgttgttgttcgtacaaaacaaggtgcacaccgtgctgatggttcatacatcaaatttgacgaaaatgctgcagtattaattaaagatgataagagccctcaaggaactcgtatctttggcccagttgcacgtgaattacgtgacaaggactacatgaagatcgtttctttggctcctgaagtattgtaatcaaccatcataacgaaggaggtgcgccattaatgttcgtaaaagttggcgacaaagttcgcgtaattagcggaaaagacaaaggcaaggaaggtactattaaacaaacccttgctaaaaagaaccgtgttgttgttgaaggccttaatatgattaaaaaacatcaaaagcctaacaatgcaaatcctcaaggtggaattcttgatgttgaagcacctatggatgtttcaaatgtaatgcttatcgatccatctacaaatgaaccaacacgtgttggcttcaaaactgttgatggtaagaaagtacgagtatcaaaaaaatctggcgagagtatcgacaaataatctaagcgaagggaggaaataatattcatggcaaatcgtttaaaagaaaaattcgttaacgaaatcacacctgatttggttaaaaagtttgactatacatcagttatgcaagtaccaaagattgaaaagatcgttttgaatatgggtgtcggtgatgcagttactaactctaagaacttagatgaagcagttgctgaattggaacttatttcaggtcaaaagccacttgttacaaaggctaaaaagtcaatcgctggattccgtcttcgtgaaggtatgtcaattggtgctaaggttacattacgtggtgaaagaatgtatgacttcttagataagttagttaacgtttcattacctcgtgttcgtgacttccgtggtgtaagtagcaaggcctttgatggtcgtggtaactacacattaggtgtacgcgaacaattgattttcccagaaatcgattttgataatgttaaccgtgttcgtggtttagatattgttatcgttacaactgcaaacacagatgaagaatcacgtgaactattggcacaattcggaatgccatttgaaaagtaagcgaagggagcaaacaaattggctaaaaaatcattagttgtaaagagtgaacgtcctgctaagttctcgacacaagcatacacacgttgcgaacgttgtggccgtccacactctgtataccgtaaattccatttatgccgtatttgccttcgtgaattagctcatgaaggacaaattcctggtatgaagaaagctagttggtaaaaaaagaaatcagagtcaaaggagggtaatactgaatgtctatgacagatcctattgcagactttcttactcgtattcgtaacgcgaacatggttcgccacgaatctttagaagtacctgcatcaaaaatcaaaaaagatatggccgaaattcttaagaacgaaggttttatcaaggatgttgaatatattgaagatgacaagcaaggcatcattcgtgtattcctaaaatatggaaagaacaacgaacgagttatctctggtttgaaacgtatttcaaaacctggattgcgttcatatgttaaatctgacgaagttcctaaggtgttgaatggtttaggtatcgcaatcatttcaacttctgaaggtgtcatcacagataaagaagcacgtgctaagaaaatcggtggagaagtattagcttacatctggtaatttttagataaggaggtgccgttcaatgagccgtatcggtagaaaaccagttgaaattccagctggtgttgaaattaaacaagacggaaacgtcgtaactgttaaaggacctaagggtgaattaacacgtacaatgagctcagatattacaatgtctgttgacggaaacgttgtatcatttgatcgtccaaacgacaataataaaatgcgtgcattacatggtactacacgtgctaacttcaacaacatggttgaaggtgttgtaaatggttttgaaaagaaacttgaactaattggtgttggttaccgtgcacaacttaaaggtaagacattaatcttaaacttaggttattcaaacccagttgaaatggaaactcctgaagaccttaaggttgaagttcctgacaacacacacattaatatcagtggtatcagcaaacaacgtgttggtgatttagctgctgaaatccgtgccgtacgttcaccagaaccatataaaggtaaaggtgttcgttacgttggtgaatatgttcgccgtaaagaaggtaaaacaggtaaataatcacgcagcttgatataattagctgagattcaaaaaatatgaggtgaaaattttgatttctaaaccagataagaacaaaaaacgtcaacgtcgtcacgcacgcgttcgttcaaaaatctctggtactgcagagtgcccacgcttaaatgtataccgttctaacaaaaacatctacgctcaagtaattgatgacgtagcgggtgtaacgctagttagtgcctcaacattagatagcgaaatttcaagtggctcaaagactgaattagcatcacaagttggtgctttagttgctaagagagctgttgaaaagaaaattgaaaatgtcgtttttgatcgtggtggatacatctatcatggtcgcgttcaagctttagctgaagctgctcgcgaaaacggacttaaattttaaggataggagggaaatacgtacatgtctaaatttatcgatccagaaaaattggaaattgaagatcgcgtagttgccatcaaccgtgttacaaaggttgttaaaggtggacgtcgtcttcgttttgctgctttagtcgttgttggtgacaagaacggtcatgtaggttttggtactggtaaagctcaagaagttccagaagctatccgtaaagcggttgaaactgcacgtaagagtttgattgaagttcctattgttggaacaactctccctcacgaagccgtcggtgtttacggtggtggacgaattctgatgaagccagctcttgaaggttctggagtagctgctggtggtgctgttcgtgccgttatggaattagcaggtatcgatgatgttacaagtaagcgtttgggttcaaacactgctgttaacgttgttcgtgctactttcgaaggtcttaagagcatgcgtaatgcagaagaagttgctgcccttcgtggggtttcagtcgatcatttagctgaataaggaggatattctgatgtcacaattaaaagttacattaattaaaagtgctgcacatcgcctcccaaaacaaagaacaattgttaaggaattaggtcttggccgagtaaatagctctgtagtcctacctaacaatgaggcaactcgtggagctattttccacattgcacatttaattgaagttgaagaagtaaaataatttttgtaagattggaggtttccttgcatgaagttgaatgaattaatgcctagcgaaggttcacgcactaaccgtaaacgtattggtcgtggtacttctagtggtacaggtaagactgctggtcgtggtcaaaagggtcaaaaggcacgtggtaaagttcgtttaggttttgaaggtggacaaatgcctctttaccgtcgaattccaaaacgtggattcacaaacatcaaccgtaaagaatttgctattgtaaaccttgatgctcttaacgtttttgatgaaggtgctgaagtaacaccagaatcattgcttaaagctggtatcattagtaaacaacttagcggtgttaaggttcttggtaatggagaaattactaagaagcttactgttaaagctaacaaattctctgaaagtgctgtaaaagcaatcgaagctgctggtggtaaaaccgaggtgatttaatgctgacgactgtcaaaaatgctttaaaagtgaaggatattagaaataagattctgttcacactcggtattttgattgtatttcgtttaggatcatatatcactgttcctggtgttaatgcgaaagcattggaaagcatgtcttcatcaggattagttggaattttgaatacgttcagtggtggtggattaacgaattactccattttcgcaatgggggtttcgccatatatcacagcacaaattattgtacaattgctacaaatggatatcgttcctaaatttgtggaatggagtaagcaaggtgaggttggtcgtcgaaagcttaatcaagctacgagatggttaacaatcgtccttgcttttgctcaatcaatcggaattacagctggttttaattatttaagtcagatgaatttggttgaatcaccaagtgtccaaacctttctaacgattggtttaatccttacggccggaactatgttaactacctggttaggtgacatgattacggaacgtgggattggacaaggagtatcaatgattatctttgcaggtatcattgctcgtacaccagttgggattcagcaaatttacactgagcagtttgttaatactgcgaaaagcgaatggacgcaaagttttattattgttggagcaattatccttgcagttttagccattgtaatttttgttacatgggtacaacaagcaagtcgtaaaattccaattcaatatacaagaagagcttctggcgcttctgatagtagttatttacctcttaaggttaacgtagctggtgttattccagttatctttgctagttcttttatttctacaccgcaaaccattttaatggcttttgcatcatcacattctgatgatacttggtacactgttttaaacgatgtattcaatatgcaaaccactaaaggtgccatcttatatactgtgttaattgtattgtttacgttcttctatgcttttgttcaggttaaccctgaaaaactagctgaaaatttacaaaaacaaggcagttatattccaggagtttggccgggaaagaaaacccaagattatatgtcaggtcttttaattagacttagtgtagttggggcattattccttggcttggttgccttaattccattgcttgcttcaaacatttttggtttggacgaatcaattggtttaggtggaacaagtcttttgattgttgttggtgtagcaatcgagttggcaaatcaacttgaagggttaatgatgaaacgagaatacgttggattcattcgaaaataattcgttagtttaacaatgaaggagaatttcaaatgagtaaattaaacctcgttttgatgggtcttccaggtgctggtaaaggtacacaggctcagagaattattgaggatttcaaaattccacatatttcaactggtgacattttccgtgaagctatgaaaaatgaaaccgaaatgggtgtggaagcaaagaagttcattgataagggtgaacttgttcccgatagtgtaactaacgggatcgtcgaagatcgtcttgcaatggacgatgtcaacgatggttttatgcttgatggttttcctagaaatatcgatcaagctaaggcgctagatgaaatgacatctcgtttaaacaaaccacttacagcagtgattaacattcatgttgatcctgaagttttggttgaaagactatctggcagatttatttgtaaaaattgtggagctacttatcataagctttacaatccaccaaaggttgaaggaacttgtgatgtttgcggacatcacgaattcttccaacgtgaggacgacaagccagaaactgtaaaaaatcgcattgctgttaatactaaacttaacactccgttgatttcttactatgaagaaaagcatctcctttacaacattaatggcgatcaggatatcaacgatgtttattctgaagtcaaaaaagtattagaggctctctaatttcgtgcttgttggtactatagataacgttcattgtttgcaaatagttttttcgtatggtaagctaattcaggtttagcttcgaaatacatattttgaggctttttgttggttattactattagaaaagttaatgggaggcacaaatttagtggctaaagataatgtcattgaaattgagggcacagttaaagaaactatgcctaatgcgatgttcaaagtagagcttgaaaatggtcatgaaattcttgctcatgtttcgggaaagattcgcatgcactatatcaaaattctacctggcgataaggttacggttgaaatgtcaccgtacgacttgtccaaaggtcgcattacctatcgtttcaaataagttttattcgtttaggaggatttattcatgaaggtacgtccatcagttaagacaatgtgtgaacattgcaaaatcattagacgtaaagggcgcgttatggtaatttgctcagcaaatcctaagcacaaacagcgtcaaggaaaataatattatacttggaggtgaaatttaatggcccgtattgcaggtgttgatttaccacgtgacaagcgaattgtcattggtttgacatatattttcggtattggtaacactaccgctcaaaaaatcttaaaagacgcagaagtatcagaagatatccgcgttcgtgatttaacagccgatcaagaagacaagatccgtgcagaagtagataactatctagttgaaggtgatcttcgtcgtacagttagtctcaatatcaagcgtctccaagaaatcggttcataccgtggtatgcgtcatcgtcgtgggttgccagttcgtggacaacatacgaagaataacgctcggacacgtaaaggtaagaaagtttctatcgcaggtagaaaaaaataattaaaggaggctaactttttatggcaacgaaaaagaatactcgcaaacgtcgagtaaaaaagaatattgaatctggagtagcacatatccattcaacattcaacaatactcttgttatgattacagatccccaaggtaacgcagttgcttggtcatctgctggtgctcttggatttaagggtagtcgtaagtctacaccttttgccgcacaaatggcatcagaagctgctgctaaagcagctatggaacatggtatgaagaatgttgaagttgctgttaagggacctggttcaggtcgtgaagctgctattcgtgcattacaagctactgggcttgaagtaagtgcaattcgtgatgttacaccagttcctcataatggatctcgtcctccaaagcgccgtcgtgtatagagttcggttctgtttgagggcaaactttataatgcattcaaaatcgaaatgcagactgcgttttgaaaggggtaaaaattagaatgatcgaatttgagaagccaaaaattcataaaattgacgaaaatgacaattatggccgatttgttattgaacccttagaacggggatatggtacaacgcttggtaattcacttcgtcgtatcctattatcatcattgccaggagcagctattactagcgttcaaattgatagtgtcttacatgaattctcaaccattgaaggtgttgtagaagacgtaacacaaattattttgaatcttaagaaggtttcgttgaagattgaatctgatgaagataaaacattagaaatcaatgttgcgggacctgctaatgtaactgctggcgatattatgggagacggtgacgtagtgattcttaatcctgagttaccaatctgtactgtagctgaaggtactacattccatgcagtactcactgctgacactggccgtggatatacatctgcggacgaaaacaaggctcgaaaggttgatatgccaatcggtgtattaccaatcgattctatttataccccaattgaacgtgttaattatcaagttgaaaatactcgtgttggtcaacgagacgactatgataaacttacgctcgatatttggactgatggttctatcactcctagtgaggcaacaagtttatctgctaaaattttaacagaacaccttgcaatctttgttaaccttaatgatcaggctaaagagactgaaattatggttgaaaaagaagaaactcacaaggaaaaaatgcttgaaatgacaattgaagaattagatctttcggtccgttcatacaattgcttaaaacgagcaggtattaacagtgttcaagaattaactgaccgcactgatgctcaaatgatgaaagttcgtaatcttggacgtaagtcattggttgaaatccaagagaaacttagtttattgggcttaggtttccgttcagaagactaatcataaggagggttcccatagatgagttatcgtaaattaggtcgtacaagctcccaacgtaaagcgttgcttcgcgatctcacaacagaattaattgttaacgaaaagatcgttactactgaagcacgcgctaaggaagttcgttctactactgaaaaaatgatcacattgggtaaacgtggcgacttgcatgcacgtcgtcaagctgcagcattcgttcgtaatgttgttgctgatgttactgaagatggtgaggacgtaaaagtttcttcatcacttcaaaaattgtttgctgatttagctccacgttatgctgatcgtaaaggtggatatactcgtatctacaagacgatgccacgccgtggagacggtgccccaatggttgttttagaattagttgattaattaatttaaaacgattttaataataacaaaatctatcacttaagataatggtagggtgttacgatgttggagaaatcctagtctagcccacggcgagtttttaacttgctatcattatcttcagtgattttttttgtatagaatgatagaattaagtccatattgtttagggagataagagactttgaataacattattgacgtaaaaaatcttacatacaaatatgcaaatagtggtgacaaaaaagcacttgataatgtttcgctctctattgaaaagggtagttggacttcaattgttgggcataatgggagtgggaagagtaccttagcacgttcgattgatggattgatgtcatataacgagggtgtaattaatgtagatggaattattttatccgatgatacagtttggaacattcgtaagaaaattggtatgattttccaaaatcctgacaatcaatttgttggagcaacggtcgaagatgatgtagcatttggcttagaaaatttaggcattgaaactgacaagatgcataagattgtcaataatgtcttaaaaaaagttcgaatggaagattttaaagagagacaacctgaccaattatctggtggacaaaagcaacgagtagctatcgctggggtgttagcttcaaaacctgaaatcattatcttagacgaagctacaagcatgcttgatcctcaaggacgctatgaaataattaatttaattaatgaaattcaccaggaaaatgatattacggtcatttctataacgcacgatgtaagtgaggctatgctatcagatcatgtcattgtcttaaatgatggtaaaatcgtcgaatctggtgctcctaaaaaagtatttaatgatgatgaaatgttaaagttaaccggcttagaaaaaccatttaatgcacatttatttgatgccttagtcgaacaaggaattcatcctccagtagaattacgaatggacgaaaatgatttggaggaatggctatgtcaattgcttttgaaagcgtagattttgtttaccaagcacatactccgtttgaaaatctatctttaagaaacattaatttaacgattcctgatggatcatatactgctattattggtcatacgggaagtggcaagtcgacgctgattcaacatgttaatggactcttacgaccaaccaagggcttggtcaatgtcgatggacaaataattaatgctaatactaaaaataaacaattagtttccttacgccaacatgtagggattgtttttcaatttcctgaaagccaactttttgctgaaacggtagttgatgatgttaagtttggtccattgaactttggagtatcagatacagaagccacgaatcgagccaaagatgcattacaaaaagttaagctaccagaagaattttggcagaagtcaccgtttgaactttctggtggacaaatgcgaagagtagcaattgcaggtgtgttggcaactaatcctaaaatccttattttagatgaaccgactgctggattagatcctcaaggaagatttgaaatgatggaactttttaatgaattacatcataaagagcaacttaccattctattagtaacccatcaaatggatgatgtggcaaattatgcagataatgtcattgtgatggatggaggacagattgttaagaatggtgctccggttgaagtttttcgagacactaagtggctaataaaacatcaactaggattacctaaagcagcaaattttgccagcaagttagctgataggggagttaaatttgataaaatgccacttgatattagtgatctagtacatcagattgttaatgtcaaagataggaggccaagtcatgaataaaattctatttggtcgttatgtccccggcacctcatttgtacatcgaatggatccgcgcgctaaattgattttgagtttgatctatattgtggctgtttttatggctaattcatggtcagcatatgcggttagttttataattgctttgactatcattgcttcatcaggaatagcctctaaattcttctgggacggcgttaaaccattaattggagtaattctattaaccgttgtgattcaggtcttcttcggcgtcggaggacacgtctattggcattggggaatattatctatcacgagtgatggcctgttaaatgctgtttacattgcaatccgatttgtcctgattattctggtatcaacggtattaactttatcaacatcaccactagagatatcaggagcaattgagtcactttttatgccacttaaaaagattcattttcctgtttatgaaatggcgttaatgctatcaattgcattaagatttgttccaacattaatagacgagacagaaaaaatcttgaatgcccaacgctcaagaggagctaattttagttcgggatcaattatggccagattaaaaaagttagtttcaatattgattcctctttttgaaagtgcgtttaatcgggctgaagaattagctacagcgatggaatctcgtggctaccagggcggcgaaggccgcagtaagtatcgagttttaaattatacaaaaaatgacataataggtacgatattcatgatggtttctgtagcattgattatggtactcagaaattggagttagtaatgcgatataaaataatattagcctatgacgggactaattttgcaggttttcaaatgcaacctaatcagcgaactgtggaaggggtcttaaaaagaatagttaataaaatagctaaaaatccaaccccggaaatttcagtttatggatcaggacgtacagatgctggagtacatgctttaggacaagtggttcattttgatttatccattgaaatgtcagaacgaagcatgttacatgcattaaatagtcaattaccattagatatgcaagtaaaaaaggttgaaatagttgatgaaacatttcatgcgcgttttaccacacatggtaaaaagtatcagtatcgaatggctttgggacaattcgtagacccgtttaaaagaaattatacaggccactggaaattccccattaatattgggttaatccaaaaagcgattaaagatttagaaggtactcatgatttttcgagttttgttgcatcagggagtaccgtaaaagatcatgttcgaaccatttatgaagctaaagtatgggaagataaaaaacaaaatgaaatcgtgtttgaattttatggcaatggcttcttatacaacatggttcgaattatggtggcagttttagttgaaataggtagtaaacgtcgtccagcagatgatataccacgtctctttgaagttaaggaccgaaatcaggcccgggggacagcacctgctagcgggctatatttaaaagaagtagattattagatttttgattgactttaatagggactgttaatataatggaagttggtattgtttacctccacaaaataagccccggaaacttattaaagttgagttaaacaaaacagaaattggaggaaattcaagtgcgtacaacatatttggctaaaccaggtgaagtagaacgtaaatggtacatcgttgatgctacagacattcctttgggacgtctttcaacagtagttgcatctattttgcgtggtaagaacaaaccaacattcactcctaatgtggatacaggtgacttcgttatcgttatcaatgctgaaaaaattaaattaactggtcgtaaggctactggtaagatttactatcaccatacattacatccaggtggtattaagtctaagactgctggtgaaatgcgtgaaaagacacctgaacgtttgattgaaacatcaattaagggtatgcttccacacaacactcttggtcgtaagcaagctttgaagttgcatgtttatgcaggttcagaacataaccaacaagctcaaaatccagaaaagcttgacatcacgaacttaatttaaggaggaattgaattttggctgaagcacaatatcgcggcactggccgtcgtaaaaactccgttgctcgtgtacgtcttgtaccgggaaccggtaaaatcacagtaaatgatcgtccaatcgaagaatacattccatttgcaaacttacgtcaagtagttgtacaaccatttggtgtaactgaaacaaacggtaactatgacgttattgctaacgttaatggtggtggattctcaggacaatctggagctatccgtcatggtatcgctcgtgcacttttggatgttgatcctgatttccgtgcacctttgaagaaagctggtcttcttacacgtgaccctcgtatgaaggaacgtaagaaatacggtcttaagaaagctcgtaaggcagctcaattctcaaaacgttaatatttatattttcgttcaaaacactttcctttgggagagtgtttttttgtttaagatgtaatctaagaaatatcaaatattttatttagtagttaattctaaaatttagtgattgctaattttgaattatagtaaaaaggattgatctctattgtaatatagaggtcaatcctttttttagatatatcatatgatagcagtataaatttcattgtcattttaaaactcttactttctcaccgagcgcaatttcaaatgaaatataattaagcttgcttgacgttttctagtaacattataattaaagttcacaggatataacgggcattatgagctttataatagtaatgtaaatttgtttaatttttagtacaataacccccatgaatcgatgcacaacgatccgtgggggttattaattgcagtgataaaagaagtatatacgttaattcgagatggggaagtaagctggggtacttactttttaataacttcggacagtatcactgcaattgtatttttatattttttaaggggtattgatataggattataccagagattgatctatgacaaacttttttaaagacctactattcttcgaaaaataaacttaaaggaacattgtattgtttatgaattaatttgatttcagaaattttaaactcacttgaaccatttaattttcgatttaaggtcgtgcgactgataccgaggtaatttgccacgtcttcttgttttatttgcttagcttttaggtgttttaatactccttgcgaagcttgggcatcgtcattcatatatttcaccatcctattatatttttatatactccttatagagattcctcccatgggattataatacttaagggtatccttttcaatatttgttatgctttaattaaaatgtatgtactgaaattgaaacattcgaatataaaggaggattccgtccttgatttttagctcggttttaagaaaggctcgtgaagaacgtaaaatgagccaaattgaattaattcgcaaaatccatgatgaatatggaattgatatatcaactagtatgttatctcgttatgaggatgagttgactccattgccaagacgaatgtcaataaaagcaatgtttgcactatcggtttatttagatattgatttaaatgaacttgctcggaaagaagttgaaaaaatcataaagataaaaaatagtaataaaaaataaattatcagcatagtgctacaagagcactatagcataggttttaaatacatgctatcgattaactgacttttatataactaaaaaactctttttaagaataatggcgactaatggaataattttactaagtctaactgaaagaaatacaaagaagattgctaatgtttaaaagcttttagaataaaattcatattctttgaaatagaaaacagtttcatttacactgtaggcgtagatgataagttataagtttgaaaggggtatgtaaaatgtcagaacataaagcacaatttcctaaaacaatggaacaactcaatcaattaattgcagatattagtcaattagaaactaatattcagcaaactcattggtatatgcgtggatcagaattctttagattacatcctcaaatggatgaatataacgaagaattaggtgaacaacttgatgaaattgctgaacgtttaattgctctgggtggttcaccatatgctacaacgcatgaatttattgatcataccggattacccgacgaaaagataacttggaatcaatattcattaccagaactaatgcaacgccttaatgatcaatttaagtatcttgccagtcagtatcggattggtatggaagtatcggatgaagaacgtgatttctccactcaagatatgttaaacggatttagggcagaagttgataaatggatttggatggttagtgcatatcttaaccaaggtcctttagataaatagaattttttataaataactgaaaaggcttagccgttgaaaaacagctaagccttttagattgaattgatattttaatcatctccatgatgatcagcgtagtaatcatttgatgcatattctttagcaagcgctggagatttataataatgagcagtagtggctatcattgcaccaccggcttccgtcagcacttcaatttttttaccgtccacagtttgagtagtgttatagtaataagttccatctccactgccttggtaccagcctcggatatttactatcctagagggattttcgtctcctttaaagataccatcattactttccataaacgtcacaacaacccagttatccttactagtatcattagcatcgtaagtaatttctgagggatgttttgaagcctcgaaagctttgtcagttttccccatacttttccaaaggttaccatcaaaagaaacggtttgaattttatcctcatcagtgtacgtataccaagttccttgcattcgtgaaggaaatacaaatttttgatcatttgtatctgcggttgtatctgatgaacctaatttattagatgacttagtggttgcagattttggagtagccgtttttttgctattaacaatatttttaaatccgttacttaaatctgtattttgagtaggttcaaaatgaactaatccatcgggagttccttgattttgttcagtgtaatagacaataggagtatgatcctgaatggtaaatagataaattcgcccgccaatggttgaaccaccattagtatcttcataaattgctaccacatttactttatatttatttgaaccgtctggcgaccagccagcagacagcttatggttgctaaaagcagttttattgtcggaaaaatcgttgggataatgtaaaccagtatatgttgtatttctatctggagtacattgagtatagctttgtttcatagtttgtccccaattaaccatgaaggaagctaatttatcatccttagtatcattccagacactcgaactttgattgctagaattttttgaataaaaacttttagcggtagagtgcttttttgtgttagaagaggtgtctgttgttttagtattactgctagtagcgttggtagtattttgcccacaggcgctcagaagtaaggtacaaagccctaaaagtaacgttaaagtaattttattatgtgcatttttcaaactgatttcctccaaaaagatttaattaatgctactaacattgtactccaaaacgttaatcgattaaatctaagtataaatcatatttgactgcagttcggagcttcaaattagctttaacaatgggtttttctttacctttaacggtacgatattgttgttctactgaatctgaatcgaaatcaacttgtcctaaataataaaaatcagagccttcatcgtcactttttttaacaaaaagtagtaaatcaatcgtgttattttggttaccttctagtagacgaactacttcattagagtcaagacgacgagggcttttagtataccaacttagtaaagaagaattatagaaaacgttgttatggtttaactcatcagggatgtccgctcgtttctggtaagtaacaaacataggacaaaatcccattttttctttataaccgtaaattgcggaagattggtctgtaggccagcctaacaagctgttgacttggcgacgtgtgtatttttgatagagtgtaaatttggtattcaaatcatagttcttactattaattaatccagttgtaattacgtcgtcgactagttttttaaagtaggagttattttgatatgaattccaaatcgattcattcaaatggtaagtattttcaatcaaagttatcatagcagtattgccatattttttgctgtcattaggctgataataagttaagtctagatgtttttccaatgaggtaatagttgccacatcagtataagtacccatttggcttagttcggtgattaaatcatttttggaatatttaccattattagtaaataaatcctgtaataaaattaattcatgaacacgcatgccgtttaaaaattctcgcgaaattaagcgcagaaagctatcctcgagcgtagttaacgcctgctggtcatgcattttaaacaaaaattgatgataattctcatatttatccacaaaaatttgagcattggtagagccgtacttttgaaaatcaaccagtaaaggaactcgaccaagtttgtttttcaagtcgatgtatgaagcacgtaacttcgtgaggagggtcaaattactattattgatggaattatagatttgttctcgcgcaatttcactaaaattaatagaagaaagtccgaccgtttgattaatagatattttgttacgaaggctatttttgtttaacgtttgatcaccagtaagggcaataggaatcatataattattctggtaatttccaatgaagtcaataatggtgacaaagtccttaccttcacttttacgcaagccacgacctagttgctgaataaagataatgctagattctgtattcctaagcataataacttgattaattttaggtatatcaataccttcattaaaaatatcaacagtaacaaggtattctatttcgccgttctcaaactttttgatagttgcttcacgattatccacagagtcctcaccagttagtgcaacggttggatgacctttttgcgtcataatttgggctacttcgtgggcttcttcagttctactacaaaaaattagaccataaacctgatcgccatcatgtccgtagtaatcaatttgttgttctacataatccatgcgctccctagaaactaagtatttcagaggcgtattatctgtgatgacttgtccctcatactcatagtcagtaattccaatgtaatgaaattcactcaacattttttcttcaatggcgtcctgaagccggatttcataagcaatgtgataatcaaaaagttcgtatatattaaaatcatctgttcgctcaggtgtggcagtcatccctaacagaaattcaggcttgaagtgattgattattttctggtaggaagctgcaccagctttgtgagcttcatcaattaaaatatagtcaaaagtattagccttaagttcatttaaaatgtctggtctagaaagggtttgaatcgtagcaaaaacgtattttcggtcaatttctttagttccaccagcgaggataccgtagtcatccgctggtccgcctaggacatttttaaaactaagcaaggctttgcggagaatttgttcccgatgaaccacgaataaaaatttacgaggccgataattacgcacatcaaaggctgctaagtatgttttaccagtaccggtagcagagataattaatccgcgcttctgaccttctgaacgtaaattaatcaaagctttaagtgctgcttgttgcattcggttaggcgttaaaggtgatttgttttccaattggaatggagtagtggggctggatagagacacattttctgaatagaatttggcatactgatcaatccatttttgatttaatggttgggctttttgccattgtttctcaacttcttgattgatttgttcagctaaacgtccttcagtttttgaagataatttgagattccattcatagttttgaattagggcattactggtcaaatttgagctaccgattaaaaatgtttgatagtcagacttattaaaaatgtatcctttagcatgaaagtcactatcagcgtcggcaatccgcacttcgacattgggaatttttaggagttccgcaaaaattttaggttgattaaaatttaaataagttgaagttataattcttccagaaacgtgatgacgggctaaatcagcaaaggttacctttaaatcggttaatactgcattagaaataaatgctacagcaaaagtaaaactcgtacaggttcgcaattcttgctctaggtgatgttttaatttttcgtgtggagtattagcaattaattgtggcgtgaattcagttttagtagcgatatttttatctaataatgctgacaaaattgaatttgaaaaattggtatttaaatccatagataaactcctaattggaacatttgttctgttttttacaattataacaataattctttaaaagcatatcaaagtagggaaactgttaaaaaaagatacttagtcctttaacccaataaaaattagccggttaaaacttttaatacgtctttatagtctttacagttacataacaaaaataaagaatttaggacacgttgtagttaaagatgtagaataatctaagtgtctttataagagataagttaaatagaatggaaatggtgggtggatctttttggcgttaatcggattgatcatttttataattgctcagctaggttatgctgggtcaattagaatggtaagggttaataaatacatggcatggattacttcaatgataatccaaaccctacttctatgcataatggcgatgttaaactggttaaggtttgggcttcgcgcggttgttattttgggctgtattttattcttggtacgtatggtaatggcgatcttcaagattcaaaaaatatcatttgaaggttttcattattttgatttgtggatgattgtgattggactttcactaggaacgactttatatagcagtcctttgcttcactatgataattattcccactgggctttaattgttaaatatttattgttacaaggacacttaccaattgcttcagatgcaattatttcgtttacttcatatcctccggcaacggctttatttatcactcaatttctaacttgggttggattcagtagtggtgcgatgttagtaggacaatttttactaatttgggcgggactttatgctgtttttgcggtattaagagattatacaaggtcaaccaatgcttttattttatgtctcaccatttcactcattaatgtgttcaacattgccattcggatgaacaatctattagttgattttatccttccggtagttgcagcagctggcattgccggtgtctatgtgtatcgacatcaaccacggttgcaatgtgttacagcctttttgttcggttcagagttatttttaattaaaaattctggaaccatgtatgtggttatgattggtttttacttattatatttgttaatgaagaactctaaagaaattaagtggtttaagcgctttggaaaaagtttgggtctaacagcccttacgatggtggggagttacctatcatttttctggtggaatcagcatgtccatgccacttttagcaccgtttctaagcatcaaattagtacatctgcatataaaaatcaattagctagtgaaagttcaaaagtaataatgaagattggtaataagtttttacatcaaattttcagtttggattcactatcaactaggggttttttactggttaatttaacgctgataatcgcgtgggttgttattcgcttgtatctcaagaaacctaataatttactcaaagtcctactagctttagatgctagttttgttgcatactatctcagtgtctttgcgatgtatattgtatcaatgccttattcagaagcaattaatttagagggttctgaacgttatttatctagtatggtaattttaaacatgttgttagccacgatggcactcgtcgtagcgatggaccgagcgatgtatgagcctgatgtaagtaaacgtggaatacgaagtttcaaaaatattattacaaaaaatacttaccaattatctgccttagttttagctttattttcaaccattctgatgttctcagaaattaacgggattaagtatcggagcacaattggaaaagaagagttaccggtagaacttaatcatattgccaaacaagatatgaaatacaatcatactaaagtattagtagttgatccgcatacagctgacgttaatgactactatgctggatatgttagtaaatactatttcttctctgataaagtagatggacgcgaaaactttatgttgtccaattcagactttaaaaaagttgttcaaagataccaatatgtggcattaccggaatggcaccgaactttcacaacaatgttgagaaaaacatatcacgaagattataaggtaggcttgtataaaattaccccaaaaggtttacaaaaagttaatcaaattaaaaattaaaaaaacttggtacgtagcaataataacaactctagggagtctattaaaattactatgtaccaagtttttttagtaaccacgagttaaatcaacaatatttgtatcaggatgcccatcttttagaaaggtttgtaagttgtggacaaacacaccctgaacacctggcagcatctcagagcttaccgctgaattatgtggtgtaattaaaacttgtggataatcccatagtgggctatctgaagcaagtggttcttcttcgaaaacatctaatgcggcatgtttaacgcgaccatcatcaagagcttgtattaaggcagaagtatcgactgatggtcctcgaccgacattaataaatagatataaatgctctaattgattaaagaattgatggtcaaacatatgagtagtttctggagttaaggggagaatgttgacaataatatcagcatcttgaatgatatttgaataagcgttatctgctacggtatcatcaaaattagtagcttcatgaccagaatggttaacaccggtagtataaccacttaaagctttagcttctcgagcaatttcttgtccaatgtgaccagtaccgaaaattaaccattttttatttgagagtagggttagttcctcataatggcgactaccatcccattgcttttggcgacgcatattaagagctaaattcatatcgcgcatgaagtataaggcatataaaagaagcgtattggcaatggcttcgctgtggacaccgctagtattggttaaagtaattttttgacctgtaagttgttgtttaggaaaataatcaattccagcactaaaagattgaatccattttaactgatggtgaggagtatctaatagagattgcacatgatggtcatagccccaagcaacttggatttcttttaagtctgccttagtaatagacgaactattaaggtatgtcacattgtctttgggtaaattagtcctaatttgtttaggaatttggtcggatatataaattttcatcttaatcctcctttgattaatcgcctcaatgatataatatatagaatactttttacagtaaggagctttaacaatgacaagaaaaaccaacgctgggaagattagtatacttgcgttatttgcagcgattattattattcaaaattatgtcccactattaggatatatccccgtaggaatatttgtagtaactacaattcacatcacggttgttattgcggcgattgttctagggccggtagacggtgcgatagttggtgggatttgggggatcgttgattgggtaaaggcacttactttaacagcgagtccttttagtaacatcgtgatggctaaccccatggtatcaattgtacctcgcattttaatcggtttagtaacaggattggtagtcaactggatgataagaattaatattaaacaacagattactttgattatcgggtcgatcattggctctttggttaatactagtttagttttaagtatgatctacgtcttttttcacaatggttctggaatttatgcagctctcaatattcaagatttgatgccatatttattgtctgtggcgggggttcatggaatacctgaggccattgcagcaggtgttattgcaccgctaatttcaattccgctgttaaaatatactaaagtgggacaagaaagattcagacaatatgaaagaaaaaattaatttttaacttggttagttgtcacaggactatgatttttttgatggttcagttaaactgaatacgtacaccaaaatgaagggtctggattgcgagtggcgaagagaaaaagaagacgaaaatctagttctttttataatcgaggtcagttacacgtttctaacttgatcggtgttttgttagcattatgcctgattgtagcagttagcatgaagttatatgtcactcagcataatgtcgtggacgatagtgtggctacggaagcatctaatgatgctcaacatcagcaatttattaaaacaattggaccgtatgcccaacaaatgcaacggcaatatggcatattacctagcattacaatggctcaagcaattttagagtcggattgggggcagagtaccctatctaaaaagtttaataactactatggaattaaaggtgattctgattctaatagtaggtattttaagacgcaggaattcgtaaatggtagatgggtaactgtttcagctcgatttagggtttattcttcatggcaagagtcaatgcgagatcattcacttcttttggttaacggaacaaattggaattcgcaacagtaccaagcggtcatcaatgcggcagattatagacaagctgcgcaagcactgtatgatgcccaatatgcaactgatccggattatcctagcaaattaattaatttaattcaaaaatatggtttaaataactatgataaatagggggatattatgaagttacttgaagataagattaagtccgaaggaatcgtattaccaaacaacgttttaaaggtagatggttttttaaatcaccaggtggatgctcaattgatgtttgaaattggcaaagaatttggacgtttatttaaaaaacagaacgtaacaaagattttaacggttgaatcttcaggaattgcccctgctgtaatgactggcttagcaatggatgtgccagttgttttcgctagaaagcataagagcttgacccttactgatgatttatacacagcgtcagtttactcatatacaaagcaaactagtaatcaaatctctatttcaaaacggtttattgatgaaaaagatcgagttttgattattgatgattttttggctaatggccaagcggtttccggattgcttgatattgcggatgcagctaatatcgatgtagtgggagtcggaattgtgattgaaaagactttccaaaagggaagccaaattattaaagaccgcgacattcagttagaatctttagcaagaattaaggcgctaacggatgatggtcaagttgaatttgaataaataagtaagaagattgatgaacaggcgggatgatttaagtggagagtgaagtaattacctctagaaaaattatttatccaggggacataattggtattattggagaaggacgttcaagtgtacaactcgttgctactgcaaagtcaatgggttttaaggttgctacatacgttacttctgagaaaaatggcgtgaatcaatatgcggacattagttttgtcggtagtattcatgatggggaaaaattacaacgctttgcagaacgttgtaaaattgttctatacgaatcagaactaattgatattaaaacaattcaatatttacaacaatttgtttcaattccacaaggagttaaattacttgaattaaatcaagatcgaatcctagaacgagcaactctagaacaaacagggattaagggaacaccctatgttacagttgtagatttagacgatttatatgagtcaattaatgaaattggatatccggctattcttcgtccaatcttaaaggatactatgactgaaaaagagttaattcttaagagtgagatagatattccaaaggccagcgtactattagaacgtggaacttatatgcttcaaccagttatgaccggtggaaaagaaatcgcagtaagtattgttaaagatcaaaataatcgacaaaaaatgtttccaatggtcgagaatgtttacgaaaaccattttctaaaagaaactaaagttccagttgatttagattcaaaagttcaaaattcagtattagaagcagcaactaaaattgctggtttagtagagtacgtaggtgtattttcaatcgtcttctatgttgatggtgaggacatctattttgaacaattaatacctggaattcgtgatgaacaaaacgtatttaatctagcgtcaaacaccacggtctatgaagaaatgctccgggccttgagtggaatgatgattagtgacatccggctccaagtaccaaccatcatgttaaacattacggatgaacaaatgaagaaaatcaaaacacagtggttaattaaatcaaattggcatttccacttctatccacaagtagatgaagcagatgctaaacagcatatcggatatatcttggcagatggtgatgatgttaaacaaattcaagaacaaattgataacactgatatttggtaaaactctgttaaagtcggtaaataaaccggctttttttgatataatggtttgtggttattttttagttacgtagatagagaggattgaacaaattgccagaaattaatttaataaagggccttaatgatatgcaaaaagaagcggttcagacaactgaaggaccgttattgattatggccggcgccggtagtggtaagacccgagttttgacgcaccgcgttgcatatctaatagaagaaaaaggtgttaatccgtggaatgttttggcaattaccttcactaataaggctgctagagagatgcgtgagcgagttactagtttgctgggtgatgaagctgctgaaatttgggtatcaacgttccatgctctttgcgtaagaattttaagaagaaatattgatcaacttggatacaatcgagcattttcgattgccgatcctagcgaacaaagaacactagttaaacatattttagccgatttaaattatgatcctaaaaagtttgatccacgttcagttttaggaacgatttccaatgctaaaaatgatttaaaaacgccactcacttatcgtgagaatgcaagtactccatatgaacaggtagttgcagatatctatgaagaatatcagcgtcgcttagagaacaatcaggctttagattttgatgatttaattatgaaaaccatcgaacttttccaaaagaatcctgaaaccttatcattttatcaaaataaatttcattatattcatgtggatgaatatcaggatactaatcaggctcaatatcaattagtaacgatgctagctaaacattttagaaatatctgtgtagttggtgattctgatcaaagtatttatggttggcggggcgccgatatgcaaaacatcatgaactttgaatcagattatccagattcaaagactgtaatgttggaacaaaactatcgttcaacccaaaatattttaaatgctgctaatgatgtgattgaaaataatgtagaacgtaaacctaaacaactttggactgataatgatgaaggtgaaaaaatttcatattatcgtggccagacggggattgatgaagctcatttcatcgttcaaaaaattcgtgagcaaattaaagagcataatttaaattacggagattttgccattctttaccggacgaatgcacagtcacgagtaattgaagatacgtttgttaaatccaacatcccttacttaatggtcgggggacataaattctacgatcgtaaggaaattagagatgtactgagttaccttactttgattgctaacgaagacgattcgatgagttttgaacgagtgatcaatgaacctaaacgtgggattggttcgacttctattgctaaattacaagctttcgcggatgaaaataattggtccttattgaaagcggctcgtagtgttcagattgcaaatggaatttctagtcgagctcgcaatgcaattgaagatttcgctaagatgattgacgctctacgtaaatcaggtgaatttttaaatatcacagaattaacagaagcagtcttggaacaaactggttatcgagctgctttagaaaaatctagaacgatggaatcagaagcacgccttgaaaatattgacgaatttttaacagttactaagcaatttgacgataagaatgaagctgagggaaatgaaattgctgacgaaaatggtgataacattcaattagtagatttcctagcggatttggccttagtttctgatcaagataatgtggaagaagaaccatcaggagtaaccctcatgaccctgcatgcggctaagggtcttgaatttccaatcgtatttttagttgggatggaagatggaatttttccactttctagagcaatgatggaccaagaacaattggaagaagaacgacgattagcctatgttggaatcacccgagcacgtcaaaagttgtatattacgaatgcttattctagaatgctttatggtaggacacaaactaatccagcttcacggttcatttcagaaattggatcacaatacttgaagagtgaaaatgaagaaaagagcttttcaagaaatactaaagaaaaatcatatccgtttgacaataaccgaaatgcacgcgcaacagctagtgtttatggtaatacccatgctacggcggttaaatctaatggtagcggagctggtaaagttagctggaatgctggggataaagtcgaacataaagcttggggtattggtaccgtagtgaaggtgtctggcgctggagaagatgccgaattggatatcgcctttaaagatcagggaattaagcggttattggccgcttttgcaccaattaaacgggttgtggaataaagaattttatacagggtttaggttagcgatataattagggataaatgaaagattgaggaaacttttctatgaatgtaactaaaaaattgagtttattagttgccacattagttatgggcgtgggactgactgcctgtggaagtttagataattcatcaatgcaatcttctaccaataatgtgaccggaaaaaagaacaaaaaaaataattaccaaacaacaggatcagcttcaggttcgtatgctggggtgattaaaaatggaaaatacgtgacaagcaagtcacggggattaactgccgatcaaaatggtaatgttaataacaccaagagtttcgagagtggattacaagacatttccaaaaagatttttccaacctctcaatatgttttccaagaaggtcaatatctgagttcagatactgttcaaaattggcttgatcgcgaatctaagagcaatccggaagggctgaaccctaagaataatggttcaaaagatccagacaaacgaaacccaatttatctccaggctcttgaagaacaggattatatggaaaaatcaggaacttctttgaaactcaaaggggttacaattggattagcgatgaattcggttgattattatcaaaaagaacaatacggcgctcaatatgagactaaaatctcagatgccgagattaaggctaagagtcaagaaattgctcaaaaagtgctagaacgacttcgcaagaaatctgaatttaaaaatgttccaattgtgattgcagtctataaacaagcttccaatgatagcctagttggtggaacatttatgcgttattctaacaattccggtgaaaagcttgcaaaatggaaagacttagactacaagaatgttgtttatccaattagtgatacggaaacctcacctaatagcaatgattctagtgcgtttgataactttaagacgcaagtagaaagcttcttccctaatttaagtgggattactgcaaaagcaagatacgacggtaaatcgatggaaggcatgagtgtatcaatcacgactcaattctatagtgagactgagattaacagttttactcaatttgtttcaactcaggctgaaaagtatcttcctagtggagttaatattgatataacaattaaatctaccgatgaagtccatagtttcttatcgcgctcagctaaagaaaagacgtttagttcccatgtcttttcaagttattaaatcttagaaggagaaatcaatgacaactgaaaataacattactaaaaaagatgtagaacatgttgctacgttagctaaactaaaatttaatgacgaacaacttgaaaaatttacggatcaaatcgaagatattatcgatttagtggatactttaaatgaggttgacacaaccaatgtcgaacctacttttaatgttactgatcaattaaatcgaatgcgtgaagatgtagctgttcgttcaaatgataaggaagcattattagctaatgcccctgaaacagaaaacggatttatccgtgtaccagcaattcttgatgaaagtggggaagcataatgaagttttttgacataacagtaacagagcttcatcaaaagttagttgataaggaattaacagtaactgaattagtttcagaaacattggatcaaattgaagccgaccaaaaagttttaaatgattttgtaactattaatcgcgagagagctctagctcaagcccgtgctatcgatgaaaagggaattaaccctgataatatttgggcgggaatcccgattgctatcaaagacaatattgtaaccaaagggatcaaaactactgctgcatctaagatgctcagtaacttcacacccatctacgatgcaactgttattgaacgtttacaagctaatgatgtagttattattggtaagacaaatatggatgaatttgccatgggtggatcaactgaaacttcatactttggtgatacgcgtaatccatgggatcatactaaggttcctggtggttcatcaggtggttctgctacaacagtttcagctgggaattcaattgctgctcttggttcagacacgggtggctcaattcgtcaaccagcctcatacactggaattgttggggtaaaaccaacttatggacgtatctcacgttatggtttaattgcttttggatcaagtttagatcaaattggacccatgacgcgtacggttaaggataatgcagctttattgaatattattgctggaatggatgagcgcgatttaactagttctgacaaaaaggtaccagacttcacatctaagattggtaaagatattaaggggatgaagattggtttgcctaaggaatatctaggcgatggaatcaatgaagacgttaaaaaagtcgtacgtcaggcagttgaaacattaaccaatttgggagcaacgattgaagaaatttcgctcccacggagtaagtacggtgtagcagcttattatattatcggttcttcagaagcttcatctaacttacaacgcttcgatggtattagatatggtcatcgagctcaaaatgtcaaaaatcttgaagatgtatatgttaaatcacgttccgaaggtttcggagatgaagtaaagcgtcgtatcatgttagggacttattcgttatcggctggtacatatgatgcatactttaagaaggcagcccaagttcgtactttaattattaatgatttcaataaaatctttgaagattatgatttgattattggaccaacagctccaacaccagcctacgctataggcgctgaagttgatgatccaactacaatgtatatgaatgatgttttaacaatcccagttaacttagcaggtttaccagcaatgtcagttcctgctggatttagtgataatatgccagtcggattacaaattattgctaaaccgtttgatgaagaaacgatgtatcaagctggggcagcttttgaagctgcgaccgaggtacattcaaagcaccctgaaatggaggacaaataatgaattttaaaacaactattgggcttgaagtccacattgaattaaaaacaaactcgaaaatttttagtccttcacccgttgaatttggtgaccaacctaatgctaatacgaacgtaattgactgggggtacccgggagtattacctcaaactaacaagggtgtggttgaggcagggatgatggctgccaaagctttacatgctaatattactagaactcaacatttcgatcgtaaaaattatttttatcctgataatcctaaggcttatcaagttacccaagcggatactccaattggtacggatggttggattgaaattgaagtagaaggtaaaaagaaaaaagtcggtattgctgagatgcatattgaagaagatgccggtaaaaatagtcataatcctaatggatactcttatgttgatttgaatcgtcagggtactccgttaattgaaattgtttctaaaccagatatcgaatcaccagatgaagcttatgcatatcttgaagcgttgcgtcaacgaattcaatttactggtatttcagatgttaagatggaagaaggatccatgcgagtcgacgttaatatttctattagaccactgggttctgaaaaatttggtacaaaagctgaattgaagaatattaattcctttaactttgttcgtaagggacttgcttttgaagaaaaacgtcaacaaaaaattctgttagctggtggacaagttcgtcctgaaacgcgtcgttatgatgaagctacggggcaaactattttgatgcgtgtcaaagaaggggcagaagattatcgttatttcccagaaccggatcttccaagcattaccattgatgatgaatggatcaaagacgttgaagataagatgccagaaatgcctggtaagcgtcgtgctcgttacgttgaagaacttggtttgacagattacgatgcgatggtcttaactcaaactaaggaaatgtcagatttctttgaagctactgttgctcaaggagctgatcctaaattaacggccaactatttgatgggggatgttaatgcttacttgaatgatcaaaaagtcgatcttcaagaaaccaaattaactcctgaacacttggccagcatggttaaaatgattactgatgaaacgatttcttctaagatggctaagaaggtctttaaagccatcacccaaggtgaagaacctacaagttgggttaaagctaaaggtctggttcaactatcagacccagccgttttgaaaccaatgatcgtagaaatcgttgataataatgaacaatctgttgctgactttaagaatggtaaagatcgagcagtgggcttcttagtgggacaaattatgaaacaaactaaaggacaagctaaccctaaagtagttaacaaaatcctaatgcaagaacttaattctcgttagaggaatagaatcggaggatgacgtacgatgcggaaacgtgcgcgaattatatataacccaacttcaggacgtgaaatgattaaacaacacttagttgaaattcttgcggtaattgagaaagcaggatatgagacaagtgcttttgctactacacctgaacccgattctgccaaaaacgaggctcgccgagctgcaaaagatggatttgatttagtggttgcagctggcggagacggaacgattaatgaagtagtaaatggaattgcaccgttacttagacgtcctaaaatggcgattatcccgactggaacaaccaatgattatgcgcgggctttacgaattccacgcgaagatccagtgggtgctgccaaagttattttgcaaaatcaacgactaaagatggatattggtaaagctggcgaaaattatttcattaatattgcggccggtggtttattaacggaactaacttatgatgtgccttcaaaccttaaaagtatttttggctatcttgcatatattgttaagggggcagaattactcccacgggtaaaaccggttgaaatggacatcgaatatgatggagaacggtatcatggtaaagcttccatgtttttcctcgcgttgacgaattcaattggtggatttgaacaaattgtaccggatgcttctctggatgacggtaaatttacaatgattattgtaaaatcaggtaatttacctaacttactccatttaatggttaaagccttaaatggaaaacatgtcaatgattcgcgaatcatttatcggaaagcacgaaaagttacggtccgtccagtaaacgatcgtgttatggttaatttggatggggagtatggtggagatgctcctatggtatttaaaaatttaaaacgccatattgaaatgttcactaacttagatgatgtaccagttaatttgattaaagaagatgacgaatatcgacaagtggaacaacaattcgtcgaagaagttcaaaatcttccagatgataacaaaatagattaaagaaaagcttgagaaatacgctgaaatgcgttacagttcttgagtagcacacgagaataaaacaggctggtattaataatgtgccagcctgtttttatcagtaaatagataggggaaataaatgaagagtacagcacctgttgaaaaaaatttagtatatacggtagaaattgaagatttaacatatcaaggcatgggagttgctaagattgaacattttccaatttttatcgctgatagtattcctggtgaaaagattgaaactaagattattaaggttcaaaagaattttgcttttggacgtgtagaaaaggtcctagaagaaagtccagatcgtgtagaaagtaatgatgcggcttatacccaaactggaattgcgccattacaacacgtcacgtatgatgcacaactaaaattcaaacaaaatcaaattaaaaacttattgaaaaaatcacatctagaagatttagaagtggctgatacagttggaatggaaaatccaaccggttatcgtaacaaggctcaaattccagtacgtaaaattaaaggaaaacttcaaactggctttttcaagcgaaacagccatgatttagttcctatcgaagatttttatattcaagatccagtaattgataaggtaatcgttgaagtacgcgatattttacgcgaattttacattgatccatatcgtgaagcagaaaataagggaattattcgaaatattatggtccgtcgtggacgtcgttcaggacagattatggtagttttgattacgcgtactaaagatgttcctcatctagcagaaattacagaagcaattgctgctattgatggtgttgttagtgtaattcaaaatattaattacaaacaaactaacgtcattatgggagatgaagaccgggttcttgctggtgaatcagttattcatgatgaacttttaggactggatttcattatttcagctcattctttctatcaagttaaccctatccaaactgaaaaactttatcaacttgctatcgataaagctggattaactggagaagaaactgtgattgatgtttatagcggaatcggtacaatttcgcttgcgatggcaaaagctgctaaaaaagtttatggcgtagaaattgttaaggaagctgttcaagacgctaaaatcaacgctttccaaaataacgcaagtaatactgaatttgttgttggtaaagccgaagaacaaatgcaaaaatggcaagaagatggcttgaaaccggacgttgttgttgttgatcctccacgaaaaggacttgaccaaagtgttattgatgcaactgttggtatgaagccaaaacgggttgtttatgtaagctgtaaccctgcaacccttgtacgtgatattgatcgttttggagaacaaggctatgtagtaaatcaaccaatcgttcccgtggaccaatttccacaaacaccacatgtagaaagcgttacggtgttagaacgacaataattaattaaaacatattattactaacccagaatgattataatcgggagtaatgatatgttttttgtttacagagaaatttaatgataattgttaatgaaaggagctaatattgtgactttacaaagaaaagatataatcatgggatgtttatttggtggagcggcgggagatgcattaggttatccggttgaatttgatacttatgaacaaattcaacaccaatatgggaatacaggaatcaagtttgaaaattttactggtaagccattaatatcagacgatacgcaaatgacattgtttacagctagtggattgatagataaatctaattatttagagaatatctggttgaactatcaagactggctggagacgcaatttaaacctaataaggaaaatatgagccatgaaccagtttcattactaattaataactatcctgaaatttttgcgagtcgcgaacctgggggaacgtgtttacgagcgttaatgcgtggaatacgaggaacattggaagagccaattaatgatagtaaagggtgtggaggagtgatgcgagtagctccgattggattactcgatgatggctttagtgaccaataaattattcatttagctgcccaaagtgctgctttaacacatggacattcacttagtacgattgcttcagtttttatggcagatctaatacatcaaaatgttgctggagagaatcgattacgtcaggcaattcaaaatactaggattttgattcaagaaacattttgtgattattctgaaatttttacatttatggaaatgctggatagtacgttagggtttatcggtaatgatgaagaagatttaaccaatctaaaaatgattggtgaaggctgggtagcggaagaaacactaatgatagcaatatatgctacattgaaatatgagaacgatccagaaaaagcgattgaagttgcggtcaatcataggggtgattcagattcgacaggggctttgactggacaaattattggagcatttcatggaatacaatgtctaccacaaaactttattagcaaattagaattaaaagatgcaatcgtagaaataggtaatcgattggtgtgagagacgatttaatattttatggtaaataaaatcttgtgtttttaataattaagggtatactcctaattaaataccattggtatctaaggagagaatatgtcgcgaaataagtatccagaacaatcacgcgagaaaatattgtatgttgcacaaaaactttttttagaaaaaggatatgaacagacaactattcaaaaaattgtggatgatttgaatggaatgactaaaggagttatctatcaccactttaagtctaaaaaagatatttggaatgccgttacggcaagaatggctggtgattcaacacaacaacgttggtttgaaaattggccaggaaagacagggttagaaaaattacagagggcattgctgagatcattaagtgaatttcagagatatgatgttgcatattcagctgaagtaatgttgaaagatcctaaaacaattggtgaattatttttaaaaaatttagctgaaggaacggatggtatcgaggggtatgtaattgagggaatgcaagatggttcgattaaaaccgaagatgcacatgaattagcggaatttattattatttcgattaatctatggattggaattcgatttactagtttaaaaagagagcaaataaaaaataaatttgaactattaaaacgtgtttatgatgggattgatgtaccacttattactaatgaaattattgacatggcagttcgtttatacgataacttacaaattgtacaaaagaagttctaattgaatcttagaacttttttttaaaatttatacataccggtagtatgtaaagaggaatgaaatgaaaaaagttatttctaaaaaatatattaaaccattgttagtaggattattcttttcaaacatcgcaacgaactcggttcaatttattatctcgttgtatattttggatcaaacagggtcgacgagtttatttgctaatattatggcgattgcactgatttcaaaaataatatacactccgttgagtggaaatttaattgatagatattcaaaaaagatattgatggttgtattggatagtatgtacctgatatgtacattaatcttgattttggcagttcatcactctgcaatatgttcagttttgatatataacataataattggagcaatttcttcggcagagacaccgctcgtgcaagcgagtgttccattattggttgaaaagcaggatttgatggtaatgaatggattagtgagtcagatgacggttttaagtggaattttggcgccaatggtagcgggagtagcatatcaagtattttcatttactactatattacttttaagtagcttattttttattattgcgataatatcagaaattacactcaagattccaatgattgatcaggaaattaaatcgagtttagccaatttcaaaaatgtgctcacatttttagtaagcactggaaagaagactggtaaattagcactattagctggagtaattaattttatagtcacggcgtttgttgaagttgctgttcccgtgctttttcgcttgaaatatcatgttgcatcaaatatttttggattgattcaggcaggactggcgtttggaatattattggcagcgatgctaactccgttaattgttaaaaagataaaattgaataatgtatatacaatgtaaatataaattaagagatatatgaggaaatgagggaacgtcatgaaaattggattgattggtttaggaaaaatgggactcaatttagcggaaaatatgttagataataatatcgaagtattggcttttgatgtctttgacaaagctagagagaatgctgaaaagcataacataaatactgtagatagtattgaacagctagttaaacaacttgatcaaccgcgaataatttggataatggtaccagccggagctcccactaacgacactatcggccaattaagcaatttattaagcaaaaatgatgttgtgattgatggaggaaatacatattatcaagattcacttcatcataatcaggtacttagtaaagctgggatttatttcttcgatgtaggaacatctggagggatgtccggagcccgccatggaggtaattttatgattggcggagataaagacaagtttggggagattgaaccattatttaaagctattgctgaaaaagatggatatctttatacaggccaagctggttcagggcattatttaaaaatggtccacaatggaatcgaatatggaatgatgcaagcgattggtgaaggatttgaagtactttctaaaagtgcatttgattatgataatgaagccgttgccaaagtatggaaccatggatcggttgtccgaagttggttgatggaactcgcacaatcagcctttagtaacgatcctaacttggatgaaataaaaggggttatgcatagttctggagagggtgcttggacggtcgaagaggcgataaggttacatgtcccaacccctgtaatcagtagttcgttgatgatgcgttatcgttctgaagaagatgatacgatgacaggaaaagtagtatctgccttaagaaatggttttggcggacataaagttgatcataaagaatagttgaggtacagaatatggattatatgattggtgttgatcttggcactactagtacaaaggtagttttatttgatatgaagggaaattcaattgcctatgcaaacaatccttatcctttatatcaggatagtccagatatggccgaggaagatccagccgaaatttttgaagcagttattaatggattaactgaagtgatgcgtaagggaaatgttaagaatggtgaattaaagggagtatcattctcaagtgcgatgcatagtttgattttgatggataaagataatcatccattaactagagttataacttgggcagataactgttcgagcaagtatgctgaagaattaaaggacaatggacttggccaacaattatacgcccatactggtgtacccactcatccaatgtcaccattagttaaattgatttggttaaagaatgaacaaccagaaatttttaaaaaggcgactcattttattggtattaaggattatgttttatttcgattatatggaaagtatgttcaggactactctcttgctaacgcgactggactatttaacattttcacgatggattgggatgaacaagcccttgaaattacgggtgtaacgcgagaccagcttccagaattagtttcccctgaatatcaattaacggggttagctaaatcgtatgcggaggtgactgggattccggaagatactccgttcatcatgggagctagtgatggtacccttagtaatctaggggttaatgcaattgaaccaggagttttggcggtaacaattggaacttctggagcagtacgcgtggttgtggataagccagttgttgacccacggggtcgattattcacatattacttggatgatggtaagtgggtagtaggcggaccggtcaataatggtggaattgtatttcgctgggttcgcgatcaattattctctcctgaaaaaattacggctgaacaaatgcaagtcaattcttatgaaattttaaccgacattgcttctaagattccagctggcgcagatggactattgtttcacccatatttaggcggagaaagagcgccgatttgggatgcaaacgcacgtggaagtttcttcggattaacgcgtcaacatactcgtgcacacatggttagagcagctttggaaggcattgtatataacctttacatggtaatgctaatgattgaaggagtagccggtaaaccgaaatcaattcaagccaccggtggatttgctaggagcgcactttggcgtcaaatgttagctgacatttttgaacaagatgttaatattccagaaagttttgaaagctcagcgctgggggccgtggtgatagggatgaagagtttgggaattgtcgacgatttgcgcgttgttaaggatatggttggggtaacaaatacacataaacccaatcaagagaattttgcttcctatcgagaattgctaccaatttggattagattaacagatgaattatctggagaatacgatagtattgcaaaatttcaaagaaatcatcctaatgaacatgcaaaaatagctgaagaagattaaagagacaatcaacggtctttttaatttaatagcaaaaagaaagcggttacttagatgggggcgtgttatttatggaaattatggtcttagttattggaataattttattgttaactttaattataaaatttaagatgaatacttatgtttcattgattattactgccgtggttgttggattaggtttagggatgccggctagccagattgctaccacgattcaaaatggaattgggagtcaattgggtgaactagcgttggtatttggctttggagctatgttgggtcgcttggttgccgacgcagggggagcctatcggattgctaataccttaatcgataaattcggacgccgcttcttacaaattgctgttgtagttgcttcgtttattattgggattgcacttttctttgaagtaggaatcgtgctattagtaccaattgtatttgcaattgcgattgaagcaggggttccagttctttccttaggaattccaatggcagcagccttatcagttactcacggatttttaccaccacatccagctcctactgcaattgctgcagtcctgaatgctaatgctggaaaggttttactttacggagtgattattgcaattccaactgtttatattgcaggtgtattattttcaaaaattgctaaaaaatatcttccagaagcgtttaaaagaaatggtaatttaaaagctttaggacctcaaaaacaatttaaattagaggaaactccgggattcggtatttcggttttaactgctcttttcccagtcatcttaatggctatcacaacgatctatgaattgattgtccacgacggtgttacacctaaaaatcctaatgcggttgacaatttttttggatttatcggttctcctagtatagctatgttaatttcattattgtttgcaatgtggtcgatgggttatcaccgtaagattgctagtaaagatattatggctactttagaagatgcggtgaaatcaattgcaatgctccttctggtaattggtggtggaggtgcgtttaaacaagttttaattgatggtggtgttggagatgcggtcaaaaatatctttgcatcatctagtatctctcctctaattttaggatggttgatagcggtagtccttcgagtggctttaggatccgcaacggtggcttccctaactgctgccggtttagtattacccttaatgcaaggggcgggaattgatccttcattaatggtgttatcagttggagcaggaagtttagctgcgagtcacgttaatgatgcaggcttctggatgttcaaagaatactttgatttatccgttaaagaaaccttactaacatggacagtactagaaacagtcatttcgattgttggattaattggcgtgttattattaagtttgattgtttaacttaaaggcattaaaatagctatctcaccacgtttcccgtaaactgtaagtgggaggtggattaaatgaaaagagctctttcaattattgcaatagtatttgttttcatagcaatctttttgggctttaggtattaccaagatacttaccaaagtagtgaagcttacactatgattccggaaaaagttccgcctaaggtacaaactaaagatgattcaggcaaagtaatcgttggtagctattcatataattataaatttaagtttgtgaccaaatctggtaaagaacaaactatgaagtatgaattaaatggagaaaacgtcaaaccctttaagccgggggcttatgccaaggctgagattagcaaaacgagaatcaacaagggacctaattatgtgaataagaatgaagttccatcaaaagcgttagaaaaattaaattaagacaataaaaaagaattttccatctaaaggaaaattctttttttgatttagattgtgtaacgtaatttagcaataaccttatcattaagtttatcttcgggaagaattcgaacgttaccactatttttaatagtgagatcggctaggtcactcagcaaattattgtgaatagctcgcgaactggttgtatcaactatttcattatctaaaatacgtccgtcaatccgaaccccctgggccaaatagatagtatcgacttgaccatgaattgctgacgtaataatttggtttaagtcggcagagattaatgctgcaccccgggccttatcaatctcatctaaatcttgttcaagcaaggctttattacgttcttgtttgaatcgttcaatccgatcttcaattttttgatcgtagtccagttcagtgggattgagatctaattcaaattcactgaagtgattaggcgttttattaacttctttgaataaagtcatattttgaggtaggcccattaaaattactggtttcgctggatcattaccaaaattatcaatgatatacttatcaacaatttggtagtaacggcgatggtcgatttctttttcagcagaagtgtcattgtggccatgaacactgatttttccattaccaacagagaccgaattagtttctccaccccgaatgtcgtcacctaaagccttttttaaagtcttgggtgcatcatctggtaacggtaattcttttaagtaacgatctgtaaaatcgtaaaggcgaattttatcgtagctaatccctaatagataaaattcaaagcgattttggtaatcaagtaacattggcaagataaatggtaaatcagtagccattgcaatatcatgggtttcaaccgttaattcttgaacaaaaatggtttttccgttggtgattaacccaaatgaatttatattattacccatattccaaagtgaagaactatcaacggttgaatcaattaattgtcgataatcatccccattatcaacatcccaagtggcttgtaaaacttctaaagcatgtttaacgagattctttagtgtaatagatgtcttttcaacgggctgattcggttcaatatccatataaacagaaataaaaggtcccttctgggtggagcgtaagaattctgttagagaagtatacttttgagtatcttgcatgttattacctccttcatattataccttcagtctaacaaccgttgaaaacggattcaaaaaatatgcctatttattaaaattgataagtcagtacaggtcgcttttttatgcgatacttggatatataaattattcttcataactcaattatagaaagaagtgttggatttgacggtggaatttgaaatagctttaaaagaagacttaccagaaattgtaaagatatataatgaaacaattgattcaaggatggcaactgctgatacaaaatatgtcacagttgaagaacgtcaggaatggtttcaagcgcatcaagaacctactcgcccgctttgggtaataaaagttaggggagtaatcgctggatggataagtttcagtagcttttatggaagaccagcttatctgcataccgtggaaattagtatttatattgatcagagttttaggggaatgcacttaggacgaaaagcaattaagtttgcggaggagcaggcacctaaattggaaattaatcgaattatggctttcatatttgcgcataatctacctagtattggtttatttaaatctgaaaattatgaaaaatggggaactctacctcagattgctgaaatagatggccaattgtacgatttaacaattatggggaagcatttaaaataataaaatttaaaaaagtcctagttttcaccgtttgaatttaagtcaaaaagaacttttttgcacaaatttggcataaaatgactgatttcataaataaatatttcatttaaagaaactttgggaattgatagaatccttttaaactagtgaataacgaggcttatattacagaatgttacaaagtcttacaaaatatcccattatccctgaaattacaaatatacctgtaatatacttcctgtaaagttatttcttgtcgaaaagaagcaaggatatgtttttttaaaataaaggagatatttatctatatgtcatttaagagtaaattttcaaaactttctatcgcattactatcaggtgccgcaattggtgccgcaatgattacaacaggcggtagcgcaaatgccgacgaaatttacacagtaaaatctggtgatactctctcagaaattagttacgcattcaacttgaatggtgactacaattcaattgctaaagcaaataacattaaaaacgttgatgttatcaatgtaggacaaaagttagttattactaatggtggggacatcaagaaagctactaaatcagaagttaaatcacttccagaagtagctaagaatactaacgctgccaatgcagctactacgagcacaacaaataatacaactacaactaacaatgctgcttcaactcaaacaacagctaaatcaagctatgttgctccagctcaaagtagcacaacaacaagcagttcaaatggcggatcagtagctcaacaaatggctgctaagaccggtgtttcagctgctacatggcaacggattatcaaccgtgaatctggtggtaatgctaatgctgtaaatgcttcatcaggggcatacggttatttccaactattaggtcatggtgaacatgctggcatgtcaacttcagaacaagttaacatggctgctagtgtatataaagctcaaggtatgtctgcttggggtgaataagcaaaagtaacgtctttatagacacttttgtgacagaggaaagttttctttcccctgttttttattaaaaacgtcctaaaatataaggttttttagaagaaatatttcattttgaattatttcataaaaacatgaatgcctttatatcaacgtttatgcagcataatattacagaatattacttctttttacaaaaaaacgggatatttatagatatccaaaatatatttgtaacaaacgtcctgtaaagtaattacctgttaagaagaaaacataaaaattaaaaaaatgatttaaaacacaaggagatatttctacatgtcaattaaagctaaactttcaaaactttctatcgcattactttctggagcagctcttggagcagccatgattacaactacaagtagtagtgcaaatgctgatgaaatttacacagtaaaatctggtgatactctttcagaaattagttatgcatttggcttaaatggtgactacaactctcttgcaaaagcaaataatattaaagatgcaaatattattgaagttggtcaaaagctggttatcacaaattctggtgatatcaagaaagctacaaaatcagaagttaacactcttccagaagtagctaagaacacaaatgctgcaaacacaacaacagcaaatacaactgcaagcacaacaacaaataagacaaacacaacaactgttgctaagacaaatacagttgcaacatcaacaccaactacaacgactacaacatcaactgtttctggtggtgaagcttcagctaaagcatggattgctaacaaggaatctggtggttcatactcagctacaaatggacaatatgttggtaaataccaattgtcatcttcatacctaaatggtgattactcagctgctaaccaagaacgtgttgctgataactacgttaagagtcgttacggtagctggtcagctgctaagtcagcttggctatcacaaggttggtactaaaattaggtaattaaattctaaaatttataaaagagggacaaactaattaagtttgtctcttttttttgatattatattcacatttttttcgataaaaaaggctatactggataaggtaaaaggaactggaggagttttgaaatgcgtatattgatgattgaagataataaatctgtttccgatatgatgggaatgttttttaaaaaagaaagatggaacgttacatttgtgtatgatggattaaaagccattgaaacttttaaaaccgatcctgaacaatgggacatcgttttacttgatttaaatttacctggaaaagatggtatggaggtagcagctgaacttcgacgcacgtcgcagtccatccccttaattatgttgacagcacgtgattcagaaagtgatcaagttttaggcttagaaatgggagccgatgaatatattactaaaccatttagtcctattacgttaatcgctcgtattaaggccttgtaccgacgagtgtcaatgagtagggaaacgatgacgcaaggtgctcagaatgcgaaattcgatgttagaacagcccatcttaagataagtacatctactcgagaggtatatttagacgaaaagcttatttcagatttaacccctaaagaattcgatttacttaaaacattggcgcagaagcccatgcaggtcttctcacgagaacaacttctacaaatagtgtgggattatgaatattatggtgatgaacgtacggtagatgcccatattaaaaagcttcgccaaaaattagaagcagttggtccacaagtggtccaaacggtatggggagttggctataagtttgatgatagtaaaatcgatgaggattagttaatatgaaattgttttttcaacagatgatggcctttttattagtaactctgtcatctttattgatcgttggattggtttttattcagtttactaaagactcagtttaccgcaacaaatggcattccttgcaagaatatgctgatagtatttttcagcaagcaattgtgttagatacagaaactgctgatgtaaagagtgtacaagttgatcagcttcaaggtgtggaaaaactgttagataatcaacacattcactttacaatctacactaatgatggaaatacgattagttatccaaaccgtaatatagcttctcgaattactaaagctcagcgaagagaattgaaaaatggtgacacggtcaaaaccaaatcacgcatgacttttgataagtcaagtcgacaagttaccatgacagagatggataagccttattttaatcgtaatggtaatctggtttgcgtgatttcgattggatcaccattagctaacgtacaggctgacatcgagaaggttaaaaagaatcttttcatgacgtttgcctttgcgattattgtagcagtgattgcttcatatttcttatcacgttacttagtaaggcgaatccaagcaattcgagaagctgcgcacaaggttacggaaggaaactttaatgttcagttagtttctgggcgtaaggatgaaattggagaattgaccaacgattttaatattatgaccgcttccttgaaagagtctaatgatgaaataaaacgccaagaagaacggcgacgagcctttatggctgatgcagctcatgaaatgagaacgccattgacaaccatcaacggtattttagaggggcttgagtatgatgcaattcctgaagatagtaaagaggaaagcgttcatttaatgcaacgagagacgaagcggcttattcggttagttaatgataatttggattatgaacggttgcgcacgaataaaattagtttaaatcgtcatcagattaatctaaagcaagcaactcaaaggattagtaaacaactagctaaaaaggccaaacttgaaaatgatgtgattattattgatatggctgatgatgtgatggtatacgctgatacagatcgcttaattcaaatcttatttaacattattcaaaatggaattcaattcactcaaaatggaaaaattactattcgggcccaaaatgctaaagatggtactgatatccaaattagcgataatggaattggtatgacagaagagcagatcaaaaatatctgggaaagatactataaggctgatgcatcaagaattcaaaccaaaggtgaatctggattggggatggcaattgtccatgaattaatgcaagttcatggaggacaaattactgtcgagagtactccagaaaaaggaacaacttttaaattacattttccagagcaacaaaaaaagcttggccattaagccaagcttttttcatggatcatcttaccacattgatggtgtgttgaaccattcgatacgttccttaacagtgttcttgatagcttctgtacctgaagcaagaactttacgaggatcgaatcctttagctttcttgtcattgtctgcttcgtagtatttacgaacagcgtttgaccaagcaatttgttgttctgtgttaacgttaaccttagaaatacccattgaaatagccttaacgatttgttccttaggaattcctgaaccaccatgaagtacaagtggtgtcttaataacatcagcaagttcttgtagacggtcaaagtttaaaccagtccagttagcagggtatacaccatggatgttaccaataccaacagcaaggaagtcaacgcctgtagcagcaagttgtttagcttcttcaacatcagctaattcaccagcaccaacgataccgtcttcttcaccaccaattgagccaacttcagcttcaactgatacgccttgagcatgtgccaaagcaacgatttcttttgtctttagaaggttatcttcaaagtcaagatcatgaccatcaaacataactgaactgtatccagcagcgatagcttctttagcagcttcgtagttaccatggtctaaatgcatgataacaggaactgtgatacccattgattctacttgtttttcaacgaggttcttaacagctttgtaaccacccatgtacttagcagcacccattgatgattggatcaagataggtgtgtgtgtttcttggcctgcagctaagatagcacgagtccattcaaggttgtttgtgttaaaagcacctacagcgtatccacccttacgagctgctgcaaatgttgatgtaccattaataaatgacataaaactggttcctcccaatattgtttatacaaacaaagagcttttctcttcgcaacacatctattttatcacaaaattaaaaaatattatacgagtttttcagaaacaagttaacatatggacgtttttaattaaaaaattagtatggtccaattttttattgaaaagtaatgaaaagccacataatacggcatttttagaatttattttacatggaataaagtatataccattttatatttacaaaataaaagttggaattcgctttcataactggtaaaatgatactttgtcttagagagagagacatatatttttagatatatatataggagagaattgaatatgagtattttaatcgcgttagttcccgcaatcatgtggggaagtattggattagttagcggtcgattaggtggaagcgcttctcaacaaacgcttggaatgacaatgggtgcggttgtcttttctttaatcactttagttctttaccatcctactttgaatggtaaaatttggattgctggtttgatttcaggtttattttgggctgtaggtcaatttaatcaatttagttcgatgaaacatattggtgtttcaaagacggttccaatttcaactggattacaattggctggtaacgccttagccggggtattaatctggcatgagtggacttctggtaatatgattatggttggtacaattgctgtcattgctttgattattggtgcagcactaacttcacttaaagataaaagtgacacaactgcagatcgaaatgacgaaaatatgccagctggaattcgcgctttggttgtttcaactattggttatatcggatatacagtaattgttcgttttgctaatgttgacgccaaagccattatcttccctcaagcaattgggatgttaattggtgctttaatttttgttctaatcgctaaagaacaaaaggaaattactaagaaaccaacttttatgaatattattactggtttgatttggggaacaggtaacatctttatgttccttgcaattccatcagttggattggcaattagttattcacttgctcaagctgggattgttatttcaacttttggttcaatttggttacttggcgaacacaagacgcgtcgtgaaatgcaatttatcatcatcggttcaattttaatcattgttggtgaaactttgctagcaacgctaaaataattttaaataaaagcaatactatagtaggaaaaatcgttttcgaggttgttaggtgacctgggaagcgatttttttcgtatttattagaaccgatggagtcgaaagtgggaatggcaatctaactaaatgaagatagttaaaaaacatcttaactaaaaagcgtaaattgttaatctgcgatacccttagtagttaaattttagtaaatattaggttaaatcggataggcttaaccaaattaagtaattttattgtataatggtacagataaagaattttaaacaaaaggggtagttattaatggcacatatttcatttgacagttctaatgttgcagattttgtacatgaaaacgaacttgcagaaatccaaccacttgttacagctgctgatcagattttacgtgatggctctggcgctggtagtgatttccgtggatggatcgatttaccatcaaattatgataaggacgaatttgcccgtatcaagaaagccgctgataagatccgcaatgactcagaagtattcgttgctatcggtattggtggttcatatttgggtgctcgtgcagccattgatttcttgaacaacactttctacaatcttcttaccaaagaacaacgtaatggtgctcctcaagtaatcttcgctggtaactcaattagttcaacttaccttgctgacgtattgaacttaatcggggaccgtgacttctcaattaacgtaatttctaagtcaggtacaactacagaaccagctattgcattccgtgttcttaaagaaaaactaatcaagaagtacggtgaagaagaagctaagaaacgtatctatgcaacaactgaccgtgctaaaggtgccctaaagacagaagctgatgcagaaaactatgaagaattcgtagttcctgatgacattggtggtcgtttctctgttctttcagctgttggtttattaccaatcgcggttgccggtggcgacattgaccaattgatgaagggtgctgaagatgcaagcaacgaatacaaggatgctgatgttacaaagaacgaagcatacaagtacgctgctttacgtaacatcctttaccgtaagggctacacaacagaacttcttgaaaactacgaaccaacacttcaatacttcggcgaatggtggaagcaattgatgggtgaatcagaaggtaaagatcaaaagggtatctacccatcttctgctaacttctcaactgacttacattcactaggacaatacatccaagaaggtcgtcgcaatttgatggaaacagttatcaatgttgaaaagcctaaccatgacatcgacattcctaaggctgaccaagaccttgatggattacgttatcttgaaggtcgcacaatggacgaagttaacaaaaaagcttaccaaggtgtaacccttgctcataacgacggtggtgttccagttatgacggttaacattcctgatcaaacagcttacacattaggctacatgatttacttcttcgaagcagctgttgctgtatctggttacttgaacggaattaatccattcaaccaaccaggtgttgaagcatacaagtcaaatatgtttgcattacttggtaaaccaggttatgaagataagacagctgaattaaacgctcgtctataaaaaactgaagtactactcagaagctatcacacttgtgatagctttttttattgaaaataatttccgaactacaaaagaaatcgttttctaggtaaggtataatattagatataaatatatcaagaaaagggaggcggacgaatggagttagttaataaacagcatcatgctttaggaacggtaattaatctttcaatagcctccatctatcaagttgatatcttagaaaaaactataaaaatgattgatgatttcgaagaccgtttaacagttaatcgatcatcttcggaagtgatggagattaaccatcaagctggaaaacaagctgttcaagtttcggaaacaacgtatcgcttgattgaaaaggcggtagaagttagtagatggcaattaggttttaacgtggccattgggccgctagtcaaattgtggaaaattggatttgatggggcgaataaacctagtcatgctcaaattttagaacggataaaattaattgacccgcaagcaattgttttgaatacccaaaatcgaagtgttttccttaaaaaagagggaatgaaattagatttagggggaattgcgaaaggatttattgctgatgaaattaagacatattggcaaagcaagcacgtagcgtcaggaattattgatttgggcggtaatgtgttgttagtggggcggagtcagcatcccgatgaaaaatggaaagttgggattcaaaatccgattaaatcaaggcacgtcccgttgggagttctacatattccagaaaagtctgttggcacatcaggcatttatgaacggaaattaatagttgaagggcagacataccatcacatgtttgattcagcgacgggatatccaattgttaataatttagctagcgtgtccatagtaagcgatcgttcgattgatggagaaatttggtcaaccatttgtttttatcaaggaattgaaaagggcaaagcgctactggccaatcaaccaggaattgaagcagtgtttattacacgggatttgaaagttcatgtaaccgatggactacagaattgtttcaatgaaatcgcgaataatagttaatccatatttttacatatagaatggggaatatttatgaaaaaatttgttgctatcggtggaacgaatagtaaaaaatcaaccaaccgtaaattactacagtacatgcaaaaaagatataaaaatgacgcagaaattaagctcgttgaggtggcgggactgccaatttttaaaaagaccaaggaaatggcgattccaaaacaagctcaaggaattgctcacgagcttgagaatgctgacggagtgattattggtactccggagtatgatcattccgttccggccatcttgcttagtacattagcatggctatcttatggaatccatcctctgctagataagccggtgatgattacgggagcttcatatggtgctttaggggcatcacgagctcaggctcaacttagacaaatactagattcaccagaaattaaagcgcggattatgcctagctctgaatttttactggctaattcgcttaaagcttttgattcagtgggaaatttaatcgatcaagaacaagttgaaagattagacggtttatttgaagactttattttattctcagatatttccaaacagttaaaccacgctaattctaataacgcaaaggaaatgcaaaacttttcatgggacgaaggttctggtagaagggatgaagaaaaatgaaactagtagcaattgcgggatctataggtgagcaatcttataatcgaatgttattacaatacattgccaagcattttgaaaacttagttgatattgaacttttaaatattgatgatgttccagttttcaatgaagatgaagatttaagtgataatattgaaattcaaaaaatatatcaaaaagtttatggagccgacggggttatcttagctaccccagaacataatcacacagtaacagctgcaattaaaaatgtcatcgaatggttatcctttaaattacatccctttgatggcaagccggtttggattgttggagcttcttatttcaaccaaggttcctcaagagcgcaactccatctaaaacagatcctcgaagctccaggagttaatgcaattgtaatgcctggtaatgaatttctacttcggaacgctaaggaagcgttcgatgcagaaggtcaattaaaggatactggtactgttcagtttttagaaatggtcatccagaaatttattaaatttgtgaaggtaattgatatgttagatgctcctgatccaaagtcttaccaagacgaagatcttgaatctaaaggtaaagtaaatacaactatcgaaggggtcgatatgcacgacgagcattgggttgaaaaagcagcccaaaaagttcacgcggtggatggaagtacttatgttaaattggatcgtggaattctaacggttgaccagcttaattatttcttgaagaccatgccagtggaacttacgtatgcagatgataacaatcagtttatttactacaacaaaaatcaaccggctgacaagatgctagcaccaagaaatcctgggcaagctggtgatccgttagcagacgttcatccagggcgagcagttgaccgagttaaacaggtgattcatgcgcttcgtaccggagaaactgatctagtttcgatgccagttccaggtaatggtccggatcgacatgttatgcattactataaagcaatgcgtgatgaaaatggtcgctatcgaggggttaatgaatgggtaactgatatcatgcccatcattaaatattatttagcatccactggccaaaaactaataaaggatccagcagccaaaccaatttcaccaattacagggattgacgtaatggctggtgcttcagctaagccagagcctgatgtaacttcaggagcttcggaagaggagcctgaaggtcttgatgtcacaagcggagcttcagaaacacctgagagcaatccagaagtagatgctacttcgggggcttcagaagtttaaatgattatataaaatgattccttgataataagggatcatttttttattgacagaagtaatatctaagactacactttaaccataatatatcaatgatattgttttgatatcacgaaaggagttaagatgggcaacaaagatcatgaaaaacgttttttgcttcgtttagatcaaaaactttatgaaaaacttcaatcggaagcggatgaacaaggacgaagcgttaatgcacatatcgttaatatcttaaatagaactaacacgccagcgacctttgagaaacgccaaattattggaaaagtcattgcaggtaaagatttaagtcagagtggactagtattagtttcaggaatttattacagatatttacttgatgataatggtaatgtggtcgaagacgcccaatatgccatcattgaagcaaatggaaatatcttaactttaagaagaatatagggggaatatttgatgttaggtattaaaatcgttccgcaaaataaccagggcttagttgagacgttaggaaagtatagtcatagtgtagaatcagggctaaatttttatattccaattttccaaaaaattcgaaagattagtttggcgatgcgacctttagcgcttcctaattattcaatcattactaaggataatgctgatgtttctgctagtttaactttgaattaccatgtaacggatgcagctaagtatcaatatgaaaatacagactcagttgaatcaatggctcaattagttcgaggtcacttacgcgatattattgggcggatggacttgaacgaagcacttggttcaacggctaaaattaatcaagaattagccttggcaattggcgacttaactaatacatatggaattaatgtcgaccgcattaacattgatgaattaacaccatcgagggcgattcaagaagcaatggataaacaattaactgctgatcgtgaaagagttgctacaattgctagggcagagggagaagcccgttcgattgaattaactaccaaagctaaaaatgatgctatcatggccactgctaaagctgaagcggacgcaactaaaacacgcgcagacgctgaacgttatcggattgatacagtccaaactgggttagctaatgcggatggaaagtacttcaaaaatcaatcgattgaagccttctccacacttgctaaatcagctgctaatctggtagtagttccatcggatggaatgacggaaataggcaatcttccagtggtaggaaaaatgttagaaaaagggatgaataaagcttaaaattttggcagacgattggatggtttgatcaagagtgatttcgaccgaaggttaatattcgtgattactgaaacctataaaaaatgagccgtgaaatatgataaaatgctccgataggtatttttatagatataggagagtaaactaatgattaattcgattgaaaatgatgatttttaccaaaagatgcaaaatgaaaaattaacggttttagatgtacgtgagaaagtagaatttatcgatggtcatgtaccgatggcacaaaattggcccttgagtgaattagccgaaaaatatagcaaattagatactagcacatcttaatgtgatttgtcgttcaggggcacgctcagcaaatgcatgtgctttcttgcaagataagggattgaacgttactaatgtaactggagggatgctagcttggaagggcgaagttatttagtagggataaaattaacaaaatgttaaatggaaagcaaaagagtcatgtagtgtgaaaactacatgactctttttaggttgattggccatactgggctcgaaccagtaaattacggattcagagtccgctgccttaccaatttggcgaatggccattaaaaaatcgcccgcacggggatcgaacccgtaactccggcttgagaggccgacgtcttaaccaatttgaccagcgggcaaattactctattaatttacactaaaaaatacgtttcgtcaataaagaccttaattaatttcaagaatttcaacctgatattgttcatcaggagcagtaactaggacaatatcatgggttttatggtgcataagtgctgaacctaagggagattggaaagagattttgttgttaaccacgtccgcctcatgttttcccacaatctcgtaggtgatttcgtcatggtcatcgacaaaacgcatcttgactatgcaacccaaatcgattttggaatgattagtgttttgaatgattttggaataactaatttgacgctgcaagtagcgtagtcggccttccatccgacgaaggtcacgtttggcggcactatattcggcattttcagaaagatcacccaaggctcgggcatcggcaagggccttgattaaggccggacgtgtctgctttaaatcatcaatttcttgattaattttagcgtagccactaggagtcataggtacaaactttggttgcataaaatcactcctttctacatggatgatgattcgaaagtaagttcaatcatatattcatgcttttcaaggatatgtgaggtggttacccagacagaatctagcccatgatttttatctaatgttttttgctggaaacgatcaagaatgtcactatttttagccacaaattcgtcagcaaatcgatcgactaataaagaattatctggaaaataaacatgtggttcagaaacgggaacggtgtccgggaaagtcatattaattacgtttctgtagccaatgtgatgaatcttaaccatctcgggtttattatcaattcggtacaaaatgttatataaagaatctgagttagttgccataaataagttcctttctacatgttgatattgtagcaaaaattcctaagtaaatgttgttgcaaatcgaaaaccaaagtgtataattgtggtttatgacaagttgtcatttttaggaggtcgaaatgccaaagcaaacattttttaatttaaaggacgaaaaacggcaacgtattatagatgcagctgaacgtgaatttagtcaatgtcctctatatgaatcttcgataaataatatcattaaggatgcgaaaattccacggggaagtttctaccaatactttgatgatttatcagatttatacgggtattattttagtttgattttagaagatattcaagagaatttgattgatagtgttcaagaggcggatggtgacattttttcagcagttaaaaaatatgctggggaatatatgaaagaaattatttcaggcaatcatcgtgatttttatagaaacttctttttaggagccaatatttcaaagcgttctaaagatggtaaacatcccgggtttgatgtatatcattcagatcgtatgaaagaactacgtgccaatcttaaaaaagaagtcaattggaaactcctaaaagtgactaacgaaaaggatcaaaatatgattcagcaattgataatgatgattttctttcattcttttgcaaattattttgtacattcaaacaacactgattcagatccggcagaagttcaaaaagaaattgaacggaacctcaactggttggaatttggtgcaagaagaacggaggataaatagttatgtggaaactactaaagtctcgatttacgtggtgggcggtattagttgggacagttttcttgatggttcaaattgcgggtgatttgcttttacctaatattacttcagatatcattaataatggtatcgccaaaaataacattggatacatttggaactcgggtttaaaaatgttattagtttcactagtaggattaattggtgcgggagttaacgtgttttttgctgcaactcaagcccaaaaagttggtaataaactacgcagtgatctcttcagaaaaatatcgttcatgtccaattatgaatttgaaaaatttggagaagcttcgttaattactcgtacaactaatgatgttattcaaattcaaaacgtgattgttatgattttacgcatgatgttaatgtcgccgattatgttagtcggagcaggatttatggcttatcaaaaacaatccgagttaaccgcagttttcttagttgcattaccattactggcagtttttgtgggaataattatgttttttgcggtccctttgtttaagggccttcagaaaaagattgaccggatcaacttggttttccgtgagggattaactggggtacgtgtcatccgagcattcaatcaagatcaatttgaacaagatcgttttgctgatgtaaaccatgattatatgaaaactggtattaaggtatttacaatcgtttctttcatgatcccggtaatgactcttttgatgagtggaactaatattggaatcgtttggtatggagctcatttaattgccaaccaaacgatgcaagttggtaatttggtagcctttatgacgtatgccactcaaattttaatgagttttatgatgctttcgatggtcttcgtaagtatcccgagagcttcagcttcggcagctcgtattaatgaagtattgaattctgaaaatagtgttaaagaccaagcaaacgtggaaaacatggttgaagattcgactgctacattggcttataacaatgttaaattcagatatcctggtgctgaacgtctttcaattgataacgctaattttgaagctaaggcgggagacaccgttgccgtaattggcggaaccgggtctggtaaaactactttgattagtttgttaccacgtttatttgatcccgaatctggttcaatcgaattgaatggcgttgatattaaaaagttaagccaattcaatctacatgaacaagtagcatttgcgcaacaaaaagcagttctctttaagggaacgattcgtgaaaatatgcgttatgggaatgaaaatgctactgacgaagagatttggcatgctttagaggtagcacaatcgacagaatttattaaacgtgatggcgatggactagatacttttgttgaacagaatggggataacttctcaggtggacaaaagcaacgtttatcaattgctagaacgttagtgaaaaaagctaaggtatatgtttttgatgattcgttttcagcccttgattttaagacagatgctaatttaagaaaagctcttcgtgaagatcccgaaattcaaaagagtattgttattatcgttgctcaacgaattgccacggttgctgatgcagatttaattctagtattagaaaatggaaaagtggtcgggcaaggaaagcatgcagaattaaaacaaacaagtaaaacttatcaagaaattatcgaatcacaaattaaggaaggagatcaagcaaatggctaaagcaaataatgcagcacgaccacaaaatgggcctcgccctggcggacatggcggtccccgtggtgtaatcgaaaagcccaagaatttttggaaatcagctggtcgattggtaaaatatctttcgccttggatgtttggtttcattgttgtccttatttttgcggcaatttctaccattcttcaaattcgagcccctaaaattttgggtgaagctacgactgaaatttttaaaggggtaatgaaaggtgcagctcagatgaagatgggtgtaccagtgcataaatttcctattgattttaccaagattgtcgaaatcttaacgtcagtgggactattgtatgtcctttcagctgcgtttagttttgttcaacaagtggtaatgacgcgcgtttctcaaaaagccgttgcacaacttcgagcagatttcaaaaataagatgcaaaaattaccgatttcttactatgatacccattcaaatggggatatcatgagtcggatgaccaatgatatggataatattagttcaactttacaacaaagtttgactcaattagtaactagtttcttccaatttgtcggggtattgtacatgatgctaacaattagttggaaactaaccctacttgctgttgcaacggtgccactgagtttgattgtcgttgcggttgtcgcacctaaatcacaaagattttttaaatctcaacaaaaacaccttggtttaatgaataatcaggttgaagaaacgtatgcgggacatacagtaatcaagacttttaatcatgaacaagatgcaattgaagattttgaaaaagaaaacgttaagtattataagtcagcttggaaagcgcaatttatcagtggattgattatgccattgatgaacttcgtcaaaaatattggttacttaatggttgctgtaattggtggtgtacaagttgcccacggaaatctttccttaggtaacgtccaagcgttcctccaatacacccaacagttctcacaaccgattactcaaattgtaaatattgctaatacacttcaaatgaccatggcttccgcagaacgagtttttgaagtgctagatgaaccagagatggaagatcttcacacagatgtagcggatgttaagacagatgctaagatgatttttgacgatgtggacttccgttatgttcctgataaaccattgattcgaaactttaatttgcgggttgagcccggagaaatggttgctatcgttggtccaactggagctggtaaaacgacgattattaatttaattgaacgtttctacgatgttaattcagggacggtttaccttgacgggaaggatactcgtaatatggaacggacggaattacgttctaaaattgcgatggttcttcaggatacttggctttttaccggaaccattcgagaaaacatcaagtatggtcgtgaaggtgcaacggatgaagaattatataacgcggctaaggcagcccatgctgattcatttattcggcagttaccagatgggtatgacaccattttaaacgaagcagcttctaatatttcacaaggtcaacgtcaattgctaacaattgcacgagctttcttagctgatcctgaaattttaattttagatgaagctacgagttcggttgatacgcgtacagaagtgttgattcaaaaagctatgaataatttattgagcaaccgtacaagtttcgtggttgcgcatcgactttctactatccgtaatgctcaaaatattgtggtagttaataacggtcaaatcgttgaaactggaaatcacgataatttaatgagccaaaatggtttctacgccgacttgtataattcacaatttgcaagtggtgaagtaatttaatttttaatgggttattcttcgtttgaaacaaaacggagaataacccattttttgttatataatgctattggaatttaggaaacggacggtaggaataaaaatggtatttactgatacagaaaatttaattcaagcgatgttggagcaacagataattcctggagcagactatacttttattcatcatggaaggttagttcatgaggtaaccacaggctatagcagcgtagtaccgattaaacggcgcttagcgcaaggtgagtattttgatgtagcttctttaaccaaagttatggggacggttcctttgacgctctggttagaacaacagggaaggattaatttagaagccccagtgagccaataccttccccaaattaaagatgcaagagttacgttacgtcatttgttgacgcatacttcgggagctacggcttggattgatcagcgggatgaattaaatgcgagtgaattacgggaagctatctacaataatttaactttcggagctgattttaatcaaaaagttgtttataacgattataatttcctattgctgggctttataattgaacgggtattacatatgccggttcaagtagcaattcagaaatatgtgctgcagccttggggattagaagccagtagcttcacccctgatcctcatcaagctattccaacgcaagtccgcaatggcatcttaactaagggacaggtacatgatcccaaggccgcttcgttaggcttgcatgctggttcagcaggactattttctaccaaacatgatgtggttaaatttaccctgaaaatgttagcaaatgaaaatgaacttttggatgaaacaaccatgcgccaattcgaagataatcaaacgactaattctaaattactccgttcatggggctgggcgtttgttactagaaaaccacatcaagttctactcagacatagcggtttcactggaacatttattttattggatcgtttaacacaaaatggattggtattcttatctaatcgggttcacccgcaacctaatttggaatttttagaatatcgacaaaaaatttatcaaacttttgccaaagaagatttttaaaaatgtaacttaaagaacaattgatgatgtggtattcttaggtaatgagtagatgaaaggggttttatagagcatgagtgaaccattatttttaaatccagtattccatgaaaaaatttggggaggggaccatttaagaactgaatttggttatgatattccaagtgaccacacgggagaatgttgggcaatttcagctcatccacatggtccagccaccattgctaacggaaaatttaaaggtattacgttagacaaactatgggaaagtcaccgagaacaatttggaaatgccaagggggaagtctttccactcttaactaagatcttagatgctaatgacgatttatctgttcaagttcatccagatgatgcctatgcagctgagcatgaacatgaattgggtaaaactgaatgttggtatatcatctcggccaaaccaggagctgaattatactacggtcataacgctaaaacacatgaagaattggcagattggattaataatggtcaatgggacaaattattccgcaaagtgccagttaaagccggtgaattttattatgtgcctagtggtacaattcatgctttaggtaagggaattatggttcttgaaactcaacaaagcagtgatacaacataccgcttgtatgattttgatcgggtagataaaaccactggtgaaaaacgtgaacttcatcttcaacaatcaattgatgtaactaacgtacctcatgaagatcctaaacttaacattactactgacgaagtaggcgacgctgaggtaactacatttgttaaagctccaatttcaaagtatttctcagtgagaaaagtttctttgaaagatggcgaagttagctttgagcgtgaaggtttgtacaccttagtttcagtattagatggagaagggaacattactgttgatggaaaaacatatactcttgttaaaggtcaacactttgttcttcctaacccagtcaaagaatggagctatagtggaaaacttgaattaattgttagtgaacctggtgaagcataaaaaagagtatctaagaaaaaattttttcttagatactcttttttagtcttagaaagttggttcaatagtaagttctttttgaggagttaaatcagcatcaggatatttacgactaagagcagttaaaattatacgcttagctaattcaccattacgagttaggattggaccatggaaataagagccataaacgtttttataaatgactccttctgattgatcttcaccgttgttaccatggccagactgaacttcccctaaaggacgttctcccttaccaaggaaagttttcccgttgtgattttcaaaaccatggtaaatttctccagtttcagcatttttgataacaatatcgccaatgaagcgattatcgtcttgacttaatgtgtagtgatctaaagcatcaatccctttaattttctcaccattcgcaccaacgtagtaatgacctagaagttgataaccaccgcagatggcaagtagtggaccgccatcttcaatataatcagttagatcttcttttttgtgttgaatatccttggaaacgatggtttgttcatagtcttgaccaccgccgaaaaagacgatatcccagtctttaggattaaattgatcatcgagactaacaatgtcaatatctaaatctgtatccatttttttagcataatattttaaagctagtaaattaccgttgtcaccataggtattcaataggtcaccataaagatgagccacgtttagattgtatttcatattaaatcccctctttgatgtaaccttctgtagctaattgtttacgtaattgaagcatggcagtgtaagttgcaaatacgtaaacacgcttggtaggtaaatttttaatatttgaaacagcatcttttaaattatcataggtccaaagttgattgtcctcaactccagctaccttaagacggaaagtgatgtctttgtaacgttcgccacccgtcatatattgttgaattggcatttgcgttaatttttcaaaatttccatcccaaatccaacttgtatcaatcccatcagcatagttagcatttagtaaaccaacaaaagaaaaaggttcgctttcagttccaaccatatcaattacttggtttaaaccaacaggatttttaactagcacgatggtaatttctttaccatctacattgatttgttcttgtcgtccaaaaacccgctcatcggggtcatttaaagccttttgaatgctagaagtaggtactcccataaatttaccgaccgaataggcggccagtgcattatagacattgtaaagtcccccgatgtgaagggtaaagttggaagcatcaatgaaaaatttagataaattgggagtaagcttggtaatctgggtaagttgataagtcaattcgggacgttcccagccgcaattagggcaataatacttaccttgattgctataactaataaatttatagtgaataatatgttcgcagcgaggacaaaccacgccatcagtattcggatctgccttcatctcaccgtcgggttgattgttaaaaccatagtagacaacaggattaggaaggtcaaccgaattgaaaatcggcatgtcgccattagcgataatggtagcttccggagctaatttaaccccatctaatatttttcgataggttgtgtaaatttcgccatagcgatccatttgatctctaaatatattagtaaaaacgaaggctaagggtttgatatattgtgttaccttaatgacgttagcttcgtctacttctaaaatagcaatatttttgccttttttagatttatggtcagttaagaaagtggtgacaatcccttgttccatgttcgaaccagttggattagtaagaacatgatcaaacttttgacgaagaactttaacggttaaagcagtggtaagggtcttaccattggtaccagtgattacgatcacatcgtagtccttaccaagatcttttagaatggttggatcaatcttagtagttattttgcctggtagtgaacttcctccagaacgaaatgtgtgtaaaaaccaatatgacgatttaccggccattttggcaattgaacttttaaatgacatgttaagccctccgaatatctttaaaacatctaaaatagtattttaagctgaaattgataaaaaagaaagtttcttatattaataagagatgaatttttattttatatcagctatacttaaatttcggagaataaaattaggagtggggctagaatggcacagttattttttcattacggagcaatgaatagtggtaagtcaattgaaattttaaaagtggctcataactatgaagaacaagataaaaaagttattttaatgacgagtggtattgatactagaacggctgttggtgaaatttccagccggattgggttgcgccgagatgctcttccaatttttgatgatacgaatattttggaattgattacgcaagctagtgcccaagaagatactgcttgtatcttgattgatgaagctcaatttttgaaaaaacatcacattatagaactagctaaagtagtcgatgacttaggaattccagtcatgacgtttggtttaaaaaatgatttcagaaatgaattgtttgaaggaactaaatacttacttttatatgccgataaaattgtggaaatgaagacaatttgttggttctgtaagcacaaagcgctaatgaatttacgcgttcatgatggtaaaccggtctatgatggtgagcaagttcaaattggtggtaatgagtcttattacccggtttgtcgtcgccattattttcacccactgactgaagaagaaatgaggaattaattaaatggatattattgaaaaagttcaggctgttgccgaccgctatgaagaattaagcgaactattagctgatcctgaagttttaggagattcacaacgttatcaagagctttctaaagaagaaggcgaaatccgtgaaactgtggaaaagtatcgtgaataccgaaaaacagttgatgctattgctgaaaacgaagaattacaacgtgaaaaattagatccagaaatggatagtttagttaaagccgaattagctgaacttcgtgaaactaaagctactttagaagaagaaattaaaattttaatgttaccaactgaccccaacgatgataaaaatatcatcatggaaattcatggagcagctggtggggatgaagctagtttatttgctgctgacctatacaacatgtatactcgttatgctgaaacccaaggatggaaagtagaagttgtggatgagaatgctactgacgttggtggtttcaaggaaatcgtattaatgatttctggtaacaaagtttattctaaattgaagtatgaaaatggcgcacatcgagttcaacgagttccagttactgaatcggcaggacgagtacatacatctacatcaaccgtaggagtaatgcctgaagcggaagatgttgatattgaaatcgatcaaaaagatattcgtacggatgtttatcgctcatctggtgctggtggacagcatattaataagacttcttcagcggttcgaatgacccacttaccaactggtatcgtagttgcgatgcaagatgaacgttcgcaacaacaaaatcgtgaaaaggcaatgcgcattttaaaggctcgggtctatgactattaccaaacgcaagaagaagatgcatataatgcagaacgtaaaagcgctgttggtaccggagatcgttccgaacgtataagaacttacaacttccctcaaaatcgggttaccgatcatcgaattggtcttactttgaacaagttagatcgagttatgaatggtgaattagatgatatcatcgatgctcttattctcgatgatcaagccaagaaagtggaacaacttcgtaatgaataatattccaacttattttgaagccctgagatgggcttctttgtttatccgaaaaaaccaaggagacgagaatgctccagaattgatcttgatggatacaatggagtggtcaagaaccgaattaatcatgcattaccgtgaaaaactttttcccgaacaatgggagaaatttcaaaccgctgtgaaaagagttgccaagggagagcctgtgcaatacgtaacgaataaggctactttttttggacgtgaattttacgttgacaaacgggtgttaattccacgggttgaaacggaagagttagtcgaaacgattctaagtaaaactaagcgcagtcgacagagacttcgagttttagatattgggacggggagtggtgatatagcgattacgcttaaattggagcgtccagaatggttagtcacggcggttgatatctctaaagatgctttaacagtggctcaacggaatgctgaaagtcatgaagctatcgttgatttcaggctagggtcattgtttgaacccgtccaaggggaacgttttgatttaattatcagcaatccgccctatattgcggataatgaaaagcatgaaatggatcaatcagtgattgactttgagcctcatcaagccttatttgctgacgaccacggattattttggtataaaagaattgcagatcaattggatcaatatttagtcgaacacggagaattgggttgcgaaattggttatcgtcaaggtacggacctaaaaaagtatttcttagaaaagaagtatattgaccaagcggaagttataaaagatcttagtcaacacgatcgaattctttgggttaaaaagaaataggtgataaaaatgagtaaattatttagttctgatgaaatacaagtagcggctcaagccatcaaagctggtgaattagtatctttcccaaccgaaaccgtttatggactgggtgcggatgcaactaatccagaggcagtaaaaaaagtttatgctgctaaaggacgtccttcggataacccactaattgtccatgttgcggaccaaacagaagttgcaaattttgctaatattgacgacaaaagcaaaaaattaatggatcaattttggccaggaccactaaccattatcttaccaattaaaaagggagctttaaattcgattgttacaggtggattagatacagctgcttttcgtaatccggctactcaagtaacaattgatttaattcgtgcagctggggtcccattggtgggcccatccgctaatacatcagggaaacctagccccactaaaccggagcatgtgttgcatgatttggacggaaaaattgctggagttctagatgatggggaaactaccatcggtgttgaatcaacggttttagatatgtcaggtacaacgccaagtatcttgcggccaggggccattacagaacaagcattggcacccttaataggtgaggttcaaaccgaccatcataaagtcggaaaagatgaagttcctaaggcgcctggaatgaaatacaaacactatgctccgaatgcccaagtatacatagtgtctgatcaggattgggacggtgtcgtagcttggctccaaaagcatactgatcaaactattggaattatggccacaaatgaaatttttgagaccaaaaaattaggagaattcgaccaagttcgatacatttccttaggggtagattctaagacggctagtcgagaactattcgatggattacgaacctttgatgctgattcagcaataaaaaccatttttgctcaaggatttgatagaatagggattggcgaggcatacatgaatcgtctccaaaaatctgcaggtaacacatactttagtgacatcgattagggggaattggtcaatgaattatacaaaacaagatccagaattatggtcagcaattgaacgtgaagaaaagcgtcagcaacataatattgaattaattgcttcggaaaatattgtatctgatagcgtacgcaaggcccaaggtagtgtacttactaataagtatgccgaaggttatcctggcaaacgttactatggtgggtgtgaatttattgaccaagtcgaacaattagcaattgatcgagcaaaagccatctttaatgcggaatatgtaaatgttcaaccccattctggttcccaagcgaatgctgctgcttatgccgcgtttattaaacctggggataaaattttaggaatggaccttaatgctggtggacatctaacacacggtgctaaagtaagctttagtggaactttttatcaatcagtgagttatggggttgatcctcaaactgaaaaattagattacgatgaaattcgtcgtattgctttaaaagaacagccacaaattattgttgcgggagcttcggcctatagtcgatttattgattggaataaattccgcgaaattgctgatgaagtcggggcttatctgatggtagatatggcccatattgctggtctggtagcagctggtctgcatccttcaccagttggcattgctgatgtggttacaactacgacacataagaccctccgaggtccccgtggtggcatgattctttcgcaggaaaaatatgccaagcaacttaattttgcggtatttcctcaaaatcaaggtggtccattagaacatgttattgctgcgaaggccgttgcctttggtgaagcattgcaaccagaatttaagacttatcaagaacaagttttaaaaaatgcgaaagcaatggctgaagtctttgaaaatgatacgattttgcacgtagtaacgggggggaccgataatcatctgatgacagtagatttaactgggacccaattaaatggtaaggaagtacagaatctgttaggtggcgtcttcattactactaataaagaagccattccagaagaaaaattaagcccatttaaaacctcaggaattcgaattggaacgccagctattacgacacgaggatttaaagaagacgactgtcgtgaagttgctaatttgataattcgagcaatcaaaaatgcggataatgaaacagttttagaagaaattaagcgagatgtgttcaaactaactgaaaagtaccctattgattaaattagtcctagtttttttatgtttttttagctacaattgataaggaatttgaaaggagcgagtttagtcatgggtaagtttgaggttctcgatcatccgttaattcaacataagttaactttgattagagataaacactgtagtacaaaagaatttagagaaatcgtcaatgaaatctcaacattaatggcatatgaagtatcacgagatatgccactgatggatgttgaaattgaaacaccaattggtaaatcaattcaaaaacagatttcaggtaaaaaagtggcgattgttccaattctacgtgctggtttaggtatggttgatggaatggccgagttattaccagttgctcgtattggtcacatcggaatgtatcgtgacgaagaaacattaaagccaactgaatactttgtaaaattaccaagtgatatcagtgaacgtcaagtattcgttgttgatccaatgcttgctactggtggatcagccattatggctgtggatgcattgaaaaaacgtggtgctaaagacatccgtttctgtagcttagtagctgctcctgaaggggttaaagcattacaagaagctcatccagacatcgatatttacacagctgctctagatgaaaagcttaatgaagatggttacatcgtcccaggattaggggatgctggtgatcgcttattcggtacaaaataaatctttaaaaagaaggccattggccttctttttttgtatgttattagtattaaaacgaactaagctttatatattagtaatatagtaaaaattcgggggaatcagcatggcttatatcgaagtaaaaaacgagtcaaaagtgtaccaaatgggtgaaacaaaaatttttgctaatcgagatgttaattttgaagttgaagaaggtaaagtgacggtgattttagggcctagtggcgcaggaaaatcaaccgtattaaatatgttaggtggtatggatagccccactagtggtcaaattatgattgataatatggatattgcgacatttaacgatcgccaattaactaattatcgacgccatgatgtaggattcgtatttcagttttataatttaattccaaatctatccacattggaaaatgttgaattagctacttccttagttaaggatggacaagcgcccgaggaagttttaaaagcagttggattacaagaaagaatggataattttccttcccagctttctggtggtgaacagcagcgtctagctattgctcgtgcgttggctaagaatcctaagttacttttatgtgatgaaccgacgggagctttggattatcaaacaggaaaacaagttttgcaattattaagtgatgctagtcgtaaatttcataaaacggtaatcattattactcacaactctgaaattgctcaaatggctgatcgggtaattcagattaacgacgcccgagtgcgagcggtaaaagataatgctaatccagttccagttaaagacattgtttggtagggtgagctaatgaataaactattaatgcgagatattaggggatcgttaggacgatttaccgcaatcgtcctaattattatgttaggtgtactattattcgttggagtgaaagcaactgggcctgctttgaaccattccatgcaatcagaggtcgttaaacatcatttgagcgatgtgcaggtcttttcggataagggatttacccgaaaggatatcaaagctgtaaagcgcgttcaaggagctaaagcggagagtattaaatttaaatatgtgattggtggaaaaacaggtgatgcgattgcactatacggtttgaaagatccagctagacaaaatcaagttattttaaaaagtggacgtctgccccaaaaaaataatgaaattttattagataaacaagcgcaaattaaggatgggtatcgaattggtgaccagtttacttttgcaaaatcagctaatcttaaagtcaatagatataaaattgtgggttttgctgattcacccctgtacatcgacgattctactagaggatcagccaatgttggtagtggtcaagttcagtatttcgcttatattaaagaccaagcaatcaatttgcctgtcgcaacagcgataaatattagttttgctaagcttcaacatcaagatgttttctcaggaaagtatcaaggaactatcaaagctaaagtaaaacttttgcagaaacaattggataaacgaaaaaacgagcgaaagaatgaaattgttgcaaaacctttaaatcagattaatagagctcaggaaaaattaaatcaagctaagcaaaaaatagttcaagctaaagcacaattaaaaaagcaatctggaggaaaggtaaccactacttcagagcttgataaacaagagcaacaattagcggaaacgcaagttaatttgaaacggcagcgaaaaaaggttgaaaagataaaagttccaagttacacatggcaaactcgtgaagatttacctggattcactggctatggagatagttctgaccggatcgccgcaattgcgaatgtctttccagtgttcttttttctgttagctgcgttaattaccttcactaccattactcggatggtagaagaggcccgtgggcaaattggaacattgaaagctttaggattttctaggagtgcgattgcctacgaatacactatgtatgcttttttggctggaattttaggagcaagcgtgggttcatttttaggtaaccaattattgccacgttttgtcgtatcaatgtatacaaagtatgtaattggtcaaccggtcattgaatatgattgggcttcaattgcaattgcagtggttttggcaatgattgccacagttggagcggccttattggtagtaatcaaggaaacaaaagcagttccagccgagttgctacggcctaaatctccgaagaaagctaagaaaattttgctagaaaatattagttttatttggaaacgtctaaattttaatcagaaaattagttatcgtaacctatttagatttaagctgagaggcttaatgacgattttggggattgcgggtggaacagcccttgttttgacaggatttggcattgccaattccatttcagcaactggagatcttcaatttaatcaaattattaaatatgatgctgtagttcaagctaaaaaagccaaccaattagaatcggttcggcagacaattgctaggggaaagaattatcagcaaagccttgcgacccatacggaaacttttaaagcaactaagcacggtaaaaccgtggatgatatcaatatggatattcctcaaaataagcaccaatttgaaaaatttgtaactttaagggactatcaaaaccaacatccgttgcatttgcaaaagcagggggtaattatttcagaaaaacttgccactgccttaaaagttagaaaaggaagtacaatttctatagaaaatgaaaagcaaactaaaaaagaagttaaggtgatcggtgtaacccaaaattatgttggaaactttatgtatggatctacttctttttataggaaaactatgaaaaaagaacctacgatgcaaactttaatggttcaattacatcaaacttctaaaaagaatcaacaaaaattaagcaagcaatggattgaagctaatgccgatattttaggtgtgagttttgtgagggatcaagctttagcagttacaagcatgtctaagcaattaggaccggttgttttgatttttattctcctatctggagtgttatctttcattgttttatataacttgaacaatattaatatttcagaacgtttgcgagaattgtcaacaattaaagtactcgggttctttgattcagaagttacaatgtatattgctagggaaagtattattttagctttgattggaatactagctggttttggattaggaaatattttgacaagttatgttatcaaacaagctgagactagcatcgtcgtctttccactaacaattaaaccaatgggatacgtggtagcagctgtattaatggtcatttttaatttaatagttgtttatattacgcatcgtcgactaaggcaagttgatatggttgaagcattgaaatcaaacgaatagttaagaatttcagagataaataaattttatttctgaaattctttttgattttaagtagataaattgaacaaatttcaatttttgaagaacgaacaggaagaatatcatagaaataaagcgattattcttttgtcttttgtccaaaatggtggtatcatttcaaatgtattttcagacggaaaatactgtcttttgttcaagtttatgacttagattattgtcaatttttggctttggtttaggtacacttaggtagaaaagaggtgatattctgtgagtggtgaatcaatttcaacttttcagtttcttggtttgacatttaatacgactaacttaatttcaggtttagtaagtgcactaattgttttttgtgtagtgtttgctttatctcgtaatttgaagttaaagccgactggtaagcaaaatattttggagtggatcgttgattttaccaatggtatcctccgcgattcagtggatgaagaggaagaaaagaattttggtctatatgctttcacattattcctatttatttttgtttctaaccaaatcggtctattcctgcaaatcgcatggaatgatgtttcgtatctaagaagcccaacagctgatccgattgtcactttaacattgtcgttgatcacaatgatgttagcgcactattcaggtgttgcaaaatttggctttaaaaaatattttgaaaaaacatatttatcgccatttaaagtttggttaccgattggtgtttttacagaattcattgatttcttgacccttgggctacgtatctacggtgttatttttgccggcgaaatgcttcttaagatgatcggaggaattgcattctcgggtggcatcgtcaatatgattgtcgccatcccacttgccttgatttggcaaggattttccgtatttttgggaagtattcaggcgttcgtgtttgtaacactaacatccgtttacatttctcataaggtcgaagacgaataataatatatttttaggtaggaggaacaactattatgggtgctattgcagctggaattgctatgtttggagccgctattggtggtggtatcggtgacggtatcgttgtcgcaaaaatgcttgaaggaatggctcgtcaacctgaattatcaggacaattaagaacaacaatgtttatcggtgttggtttggttgaagctatgcctatccttgccttcgttatttcacttcttgtaatgaataagtaggcatgataaattaaacaatttatcggagaaggaggtgtcaatagatgttttcgcacattatagtaggggcggcacatggaagtactttgtacgttggtgatatgttgttttatgccatcttgtttattgtattaatggctttaattgcaaaatttgcgtggggtccagttaatgcaatgttgaaggaacgtgctgatcgtatctctaacgacattgactcagctgaacagtctcgaatcgaggctgaaaagcttgctaaacaacgtaaagaagcattagataattctcatgctgaagctacttctatcattaacaacgctaaagatagtggtgcaaaagaacgagaattgattattggaaatgctcaaaatgaagctaagtctctaaaggacaaggctaaacaagatattgaacaagaacgtgctgacgcacttaaaagtgcacaagacgatattgcgtcattatctattgagattgcttccaaagttatcaaaaaagaacttgatgaaaacagtcaaaaggatttgattgattcatacatcgaaggtttgggtgatagcaaatgagtttagataaaacaacaattgctaagcgttattcaaaagccctctttgaaattgtttctgaaaaaggacaacgcgatgaaacacgtgctgaactaaatcaaattcaacaagtttttaatgataatgaaggattaggcaaaattttaactgacaaaggtttggagcaaaatcaaaagcttgaaattctcaatattttgactaaagatgcttcaaattacgttggaaatctcatcaaaatgacttttgattatggtcgtatggactatttgacagcgattattgatgagtttaacaacttgtgtgacgctgatgaaaaaatcgttcgagcaaaagttgtttctgctatcccattaagtgatcaacaacttgataaaatggcagaacaattcgctaaacgtttaaaagttagtgaagttgtcttagatagtgaagttgatgattcaatcatcggtggagctatcatcaaaacagatagtttgatctacgatggtagtattcagactcaaattaatcaaattagacagcgcctaataggttagctcgatatttgtaaagaggtgaaacttttatgagcattaaggctgaggaaatcagtgctctaatcaaacagcaattagaaaactaccaagctgagcttaatgtcgaagaaactggtaccgttacatatgttggtgatggtattgctcgtgctcatggcttaaataatgctctttctggtgaacttctagaattctctaacggtgttttcggtatggttcaaaaccttgaatcaaacgatgttggtattgttatcatgggtaactatgatggtatccacgaaggagacgtagttaagagaactggtcgtatcatggaagttccagttggagatgccttaattggtcgagttgttaacccattgggtgaaccacttgatggcaagggagcaatccaaaccaccaaaacccgtccggtagaaaataaggcacctggtgttatgcaacgtaaatcagttgaacagccacttcaaacaggtattaaagctatcgatgctttagttccaattggtcgtggacaacgtgaattgattatcggtgaccgtaagacaggtaagactacaatcgctatcgatacaatcttgaatcaaaaagatcaagatatgatttgtatctatgttgcaatcggacaaaaggaatcaactgttcgtacacaagtagaaacattgagacgttacggtgcgatggactatacaatcgttgttagtgctggtccttctgaaccagctccaatgctatatcttgctccttatgccggagcagcaatgggtgaagaattcatgtacaacggcaaacatgttttgatcgtatacgatgatctatcaaaacaagctgatgcttaccgtgaactctcattaattcttcgccgtccgcctgggcgtgaagcttaccctggtgatatcttctatactcactcacgtttgcttgaacgtgcagctaagttgagtgatgatttgggtggaggttcaatgactgctttgcctttcgttgaaactaaagctggggatgtttcagcttatatcccaactaacgttatttcaatcactgatggacaagtgttccttgatggtgattactttaactcaggaactcgtccagctattgatgctggtacttctgtttctcgtgttggtggggatgcccagattaaggcgatgaagaaggttgccggaactcttcgtttggatttagcttcatatcgtgaattggaatcatttgctcaatttggttcagatttggataaagcaactcaagctaagttggctcgtggtcgtcggactgttgaagttctaaaacaaccacttcatcaaccactttccgttgaaaaccaagttatgattctttatgcattaactcatggtttcttggacaatgttcctgtcgatgatattcaacgtttccaagatgaactctttgactatattgcaagtaacaataaggagctcacagacgaaatccgtgaaactaagcaacttcctgatacggacaagatggatgcagcaattaaatcatttgctgaacattttcaacctacaaaggaagctaaataaggatatcagctaacgagaggaaaagtggtgagaattaatggcaatatctgaacaagatgtaaagcgtcgaattgattcgactaagaaaactagtcaaattacgactgctatgcaaatggtttcaactgctaagttaagccaaattcagagacatacagttggatatcaagtgtatgcacaaaaagttgagagtattgttgctcaccttgctaaatcacatttaatgagcgctagtgtagctggtaaggctaagtctgaccaagctatctcggctgctgatttactagcacaacgtcctgtcaagaagactggatatttaattatcacttctgatcgtggcttagttggttcatacaacagcagtgtgattaagcaaacaaacgattttatgcaaaagcatgggcatactgaaggcgatgccgttattctcgcggtaggtggcactggttctgatttctatcgaaatcgtaatcatgaagttgcttacgaataccgcggtgtcagcgacgttccaactttcaatgaaattcgtgaaattgttaaaactgttactaaaatgtacacagaagaaaaatttgatgaattatacgtatgctacaaccactttgtaaatagactttcaaatagtttccgagtaactaaattacttccaattggtggagatgatttggctaataacgaagctcatgaacaagttactgctgagtatgacactgaaccatcaccagaagcattattgcaggaaattcttcctcaatatgctgaaagtttggtttatggtgctatcttagatgcaaagactgcagaacatgctgctagttcatcagcgatgcgctcagcatctgataatgctagtgatttgattgcagatttagagctacagtataatcgtgctagacaaagtgctattacgactgaaatcaccgaaattactggtggtcaagctgcacttgaataatattaacgagaggaattaaacgatatgagtactggtaaagttgttcaagttatcggaccagttatcgacgttgaatttccccttgacgaagaattaccaactatcaataacgctttgaagattaaaaaggcggatggtactgtcctagtttctgaagtaacgcttgaattaggtgatggtgttgtaagaaccatcgctatggatggaacagatgggctacaacgtggtcttgatgttgaagatactggagattctattaaagtacccgttggtaaagaaacacttggtcgtgttttcaacgtcttgggtgacactatcgatggcggcaaagaacttggccccgatataaaacgcgatccaatccatcgtgatccaccagattatgatgaattgaatccaagtacagaaattcttgaaacaggtatcaaggttattgacttacttgccccatatattcgtggtggtaagattggtcttttcggaggtgccggggttggtaaaaccgttttgattcaagaattaatccataatattgcacaagaacataatggtatctcagtttttactggtgttggtgaaagaacacgtgaaggtaatgacttatacttcgaaatgaagggatccggagttcttgaacgtacggccatggtatatggtcaaatgaacgagccgcctggggctcgtatgcgagttgctcttactggtttgacaattgcggaacatttccgtgatgttgaagggcaagatgtgttgttatttattgataacattttccgtttcacgcaagctggttcagaagtttcggccttacttggtcgtattccttcagccgttggttaccaaccaacacttgctacagaaatgggacaacttcaagaacgtattacatcaacaaagaagggttcagtaacatcaatccaagcagtttatgttcctgctgatgattatactgatcctgctcctgctacaacatttgctcatttggatgcaactactaacttggaacgtgcattgactcaacaaggtatttaccctgctgtggatcctcttgcatctacttcaactgcgcttgacccacaaattgttggtgaagaacattatgaagtagctacagaggtacaacatgttctccaacgttataaggaattgcaagatatcatctctatccttggtatggatgaattatctgatgaagaaaagaccgtcgttgctcgtgcacgtcgtacccaactcttcttatctcaagacttcagtgttgctgctcaatttactggccttccaggtcactatgtaaagattgaagacacaatttctggattcaagggtatccttgatggtaagtatgatgatcttcctgaagaagcattccgtttggttggatcaattgatgatgtagtcgaaaaggctaaaaaaataagtgctacagaagattaggagggatctaattggctgaaaattcagtattaacagttagtattgttactcctgatagtcaagtctatgatgatgaccaagttaccatgttggtagttaataccaaagaaggtgaattaggtatcttgcctaatcacgttcctgtaattgctgctcttgcgattgatgaagtgcgggtaaaacacagtcaagaggaagacgttattgcagtaaatggtggatttgttgaattttctgagaatactgcaactattgttgcggataccgctgaaaatcaatctgatatcgacgtagctcgtgctgaaagtgctaagaaacgtgctgaagcaacgattcgtaaagcgcaacaagcacacgacaatagtgaattacggcgtgctcaaatttcacttcgtcgggctattaaccgaattaatgtatcaaaacattaatttagttattggtcataaaaaacgctcaattttgagcgttttttttgtgtttaaaaatgataaatttagcttagtttctggtacaataatacatgtatgaaattttggaggaaaattatgttaggaattcaatctgtaataactttaatttgttatctatttttcatcctgatttccttttggagtattcaggctattccatttcataaatttatgggaagatatgagaatcaagcacgggttttaatcgtattgctgtctgtggttattggatatacggtaagtagttttttcttaaatttaattacaacgattgaaaatttaacatttttagtcaaataggggattaaacctaaatgaagcaaattttgttactgattattcgtgggtatcaaaaatttatctcgccaatgtttccgccatcttgtcgatattatccaacttgttctaattatagcctccaagccatcaaacgatttggtgccataaaaggcggcttgatgggggttgcaagaattttaaggtgtcatccatttgtgcgaggcggatacgatccagtgccagataatttttctttaaaacgcaatcaaaaaaatagtaaaccaagaaattaggagttaaaatgtctagaagagagaaaaagttcgaaatcgaaattaaagaagttaaagaaaatgattcagttatcaatgaggtttatatcaacagacagttagttggtcaaatttctcaagtaaatgataagaattttacagcttctaaccaaagtggagaaatgcgtgtaaaatctatggatgaaggaattcaatggattgtagctgaatttaacctacattctctatagaaaggagctacctcgatggaaagaatgaattctagggttgctcgaaaggatgatagttcccggattgactatggaattatttttccagtgctaatgctagcaattatcgggctggcgtccatctacgtagctgcgacacatgatactagtgctacaagcatcttacgacaggttgtttctcagttagtttggtacgtattgggtatcgtaattgtcactgtcataatgcaatttgattcgaaacaattgtggaaactagcaccaattgtgtatggaattggactacttttgttagttctagtcttatttctatacagtcgagcctacgcggctaatacgggagcaaagagctggtttgctctaggaccctttaccttccagccctctgaagtaatgaaaccagcttatattttgatgatggcaaaagttattacggtttacaactcaaaagtaaaagagcgcacagtccgcagtgattggaagcttattggaacaatgattttatggactttaccagtgcctattttgttattgttgcaacatgactttggtacgatgttagtgtttattgctatttttgctggattagtcgtggtttcgggagttacttggcgaattttggtaccgtcttttgtcggaatggtggtattaggaagttcaaccttgatgctggtcgctacaagttggggacaatcatttttgagcaagttaggttttgaatcttatcaatttgctcgaatcgataattggttgcatcctgcttcggatactactaattcaggttatcaattatggcaaagtatgaaagctatcggttctgggcaattatttggaaaaggtttcaacgtttcgaacgttaacgttccggttcgagaatctgatatgattttttcggttattggagaaaattttggatttgtcggtagtgtagtattaattggactatactttttattaatttataaaattatccaagtcatttttgatactaaaaatgaattttatgcgtatatagcagtgggagttatcatgatgattctattccatgtatttgaaaatattggaatgaacatcgggcttttaccactaactggaattccgctaccgtttgttagtgcaggaggttcggcattgatcggaaatatgattggcgtggggttaatcatgtcgatgaggtaccattattattcttatagtaaaacaggattagaacaaaaagctgatttctaaaaactagtgatacaaattaggtatcctagtttttttatttttagtgttgacagctaaactgatggcatgtatactttagcctattaacaaagtattagagaaagatgagtaaacagatttatctacgcttagagagtttccggttggtggaaggaaatcgaggtaatcgttgaagatggtctttcaatttattcagcggatttgtgagcatttagttagcaaatcatgggagcgcccattacagcgcacgggttgattgacccgcagagttcgttgaccgtaaggcaacgaaaaaacaaggtggtaacacgacaaactttcgtccttgaatatagctttagctatattcgggcgaaagtttttttgtttaaaagggggattagaattgattgaatttaaggacgtttcaaaaacttttgaaaccaaagaaggaacagtccacgcaattaaggatgttaatttaaaaattgatagtggaaaaatatacggcattatcggatattctggtgctggtaaaacgactttaattcgaatgttaaatggtcttgagaagccgacaactgggagtgttaatatcaatggagtagcaatcaatcaattatcagctaaagatttacgcgtccaacgccataaaattggaatgatattccaacattttaatttattatggtcaagaaccgtaaaagaaaatgttatgtttccattagaaattgctggagttgctaaagctgaacgtgaaaagaaggctttagagttaatcgatttggttggtttagaaggaaaggaagatatgtatccagcttccctatccggagggcaaaagcaacgagtgggtgttgctcgagcactggcaaatgatccagaaattcttctctctgatgaagctactagtgctttagatccagaaacaaccgatgaggtactagatttattacttgatattaagaaacgtctgaatatcaccattgtattgattacccacgaaatgcatgtcattcgtaaaatttgtgataatgtagccgttttagacggcggtaagattattgaagagggagaagtactgaatgtcttcaaaaatcctcaacaaccgttaacacaacgttttgtttccgcagaatctgatccaagtcatcaagaaacagaaattgttttagatgagttattaaataaatatcccaatagtagaatcgttcggctaactttccatggggatcaggctaaattaccgatcgtttcggaaatggtacatgaatttcccaaagttgatttaaatatcgttgcaggtaatattaagcaaactcaagagggttctattgggacattatatttacaattaacaggacctgaaccacaagtagctgggtcggttaatttcttaaagaaattacgggtagaaacggaggttatcgcagatgggaagtagttcttattttgattttagttcagttgattggactgaaatggggagtgcaacttgggagacgatttgggtaacgcttgtgtctgttttattcacagcaattattggctgcttgataggtctcttactctttgaaaccaaagatagcaagagtaaaggaattcaggtagttaattggttagtttcgttatttgttaatgtattccgatcaattccttatattattttaatcgttgttttgattccttttactaatacgttagtccacaccattgtaggtccagtagcagctttaccttctctaattctttctgcggctcctttttttggacgaattgtagaaatgtcgtttagagaaattgatcaaggcgttctagaagcagcagaagcgatgggtgcaagccattggacaattatctttaaagttttgttacctgaaagtttacccgcgctggtatcaggcttgactgttacagcaatttcgttagtaggatatacagcaatggctggagccatcggtgcgggaggcttaggcgccttagcgtataacaatggtttcttgcaatataatggaacaatcattctggtggcaacgattctaattgtattatttgtttttgttcttcaatggattggtgatttattagttaaaattattgataaaagggttgtttaatcaaggaggaaatttttatgaaaaagagtagagttttaaccgcattaacaattgcagcaactgcagtagctttggcagcttgtggaagtaccgctaaaaaaacaacgacggttaccattggggcttcacctacccctcatgcagaaatcttaaagcatattcaacctgaactaaaaaaggaaggggtaaatcttaaaattaaacaatttcaagattatgttttacctaacaaggcattagcttctaaagatatcgatgctaactacttccaacacactcctttcctaaaagaatggaacgccaagaacaaaggaaatttgattagcgcaggttcaattcacctagaaccgattgcagtttattcaaagaagtataaatcactaaaagatctacctaaaaatgcgacggtactagtaagcaataatgtagcagattatggacgggtgcttgaaatctttaaagatgctgggttaattactctcaagaagggtacggataccacgaatgctaactttaaggatattgccactaataagaagaatattaaatttaagacggggtacgaacctaaattgatgcctcaactctacaataataaacaaggtgatgcggaagtaattaattctaattatgcagttcaggctaaattaagtcccgccaaagatgcgattgcagttgaaaaatcatcgtctccatatagcaacattgtagcaattagaccagatgaaaagaacaataaagcccttaagaaagtgattaaggcacttaagtcaaaatcaactcaaagttggattaaaaaacactttaaaggttctgtagagccggttgaataacttctaaaatctgtaataacactgaatgttattacagattttttgttggtctgacggggttaaacatgtcaatttaattgactttttgcacgataacccatatagttagttacatgactaattaagtttataatgaaggaattaataaaatttgaaggtggatgttatgcaatttaattttaatagcagcgaaccaatctatctccaagtcgcccaacagattgaagatgcaatctttaccggcggttttaaagagggagaacagatcccttccactactgaaatatcaaaagaatttcacataaatcctgcaacagttttaaaaggaatgaatcaactggtttcacgaaagcttttagaaaaacatcgtggagtaggaatgttcgtggctgagggggcaagtaatcaaattactttgaatcgccagcaaaatttctataataagtatgtaataggggtagttaaggaagcagttcgccttaatattaatgaggaagatttaaaaaaattaattgaacaggggtataaatctatatgaaggggatcgaagtaaagcaggtaaccaagtcattcgataaaaaaatgattttaaatggaattgggatgacaattgagcctaataaaatttatggtttgttaggtcgaaatggggctggaaaaagtactttactaagcttattagtaaaccgaattgctccggatacgggaggaattcggttagataataaagttattcgtgataatgatgaacaactctctaagatgtttttgatgagtgaagtggatctttatcctaaaaaccttaaagttaaggatgttttcaagtggaccaagagcttttacgggggctttgatgaagaactcgcacaagatttatgtgagaagtttggattacaaactaatattatttttaataagttatcaaccggttaccgtactattatgaagttaatcgttgcattggcggttccggtggaatatgttttcttagatgaacctattctaggtttagatgccggtcatcgagaaattttctataatgccttagttgagacatatgcggaaaatcctcgtacttttgttatttcaacccatctaattgaagagattgctaatttaattgagcatgtcttagtaatcgatcatggtcgtttaattgtggatgatgaaaccgaaaaagtgctaggtgaagcttacgtagttagcggacctgaggacaaggtggatgaatacacccaagggttgaacgttattgggagcgataaattggctcgaatcaaagctagttatgtttttggttcattagataacaaaccaatttcggacttaattaacattgatcaaatggatttacaaaccttatttgtcaatttaacaaatggaggtaatgagaatgaataaagtagctagcgtaatcaagtacgatttaagttattttgtccgcttgattttaattgtttacctgtggctaattggtttgctagtaggaattccagtgctattacatttagtagccagtggtaccgaagggatggccattgccatcttaaatgatttatctctattaacgacggcagccttgtttgttaacgtagccttactattttattttggctttttaacgtacgagcgcttttctttcttaattcaaaatggaatttcgcgaagaacaggttggtatgcaaaggttatatcgatattaattgtagcgttaatctgtaatatttatagttttattaccggattgtttgcattaaacgggggaagtgggtataagtcagtaccttatttagaattatatggtcatttctttaaatcactgtcattagatttagtttcaatgtttattgttaactatattatgttggttatgctagccgtctttggtatcattgcgggagccgtctttgcgctattaacacggaaaaatcaaaaaattgtggcaatatcaatccctattttaggaatcctgttattagcgatattggagagaatagttatacgacaatcgcatatattagacccgttggtagcattcttaaaatttgctatgggttattctaaaactttaggttactttaacccaatcattccagcgacaggtatggtaatattgattgtattatctttgataatctcaagatggttaaatacattattacgtactaaacgaggagaatgacttttatatggatcagacaagcaatagaacattaaagaaagaagtcctagaactctatcggggaaactggataacagcaattaaaattaacattataccaattgtttgctccatttttagtggatttataattgctagtttgattggaataattttatatttttttagtcagattgatagcagcgcactaggtacaatgggaaattacagtcaaaattcagggaccccttattcaggtaggacgactgctcaacaatttttctttcaagcaatcgtagtattttttacagtgggaattcaatacggaattttagattggttacgacaccgaaatcagcgtctttcatgggggacagcccttcaaacctttagcagaaagtattttacatcaactctagctatttttatttttcaatttattttccgcttcttatggtccttcttgctcattattccgggttggatcaaatattattcgtattcacaagcctattttctttataaagaagccactgatcggaagataagtgatcgttttgaatttgttaatttcattacttttagtcgacgactcatggatggcaataaggcaagattactgggattacaaatttcattaattggatggtacattttaagcatcattacgtttggaataggatttatttggtacgttccctatcgcaacgggctttatgtcgcattttataaaaatttagttgaacagcgtggtcaacaagttcttccagaaatatttggatgacaaaaacgcatctaaacttagcttttaactaagtttagatgcgttttttaatctgtagtatgtcttgctccgtagaaagtgtaaacaataattccaatgataaaccaaactagtgagtataatttagcttgggcgtctagtccccagaaaactgccagagagcctaagaaagccaaggcaggaagaacagggtagagcggcattttgaagcttggaatagcaatatccttaccttcacgtggtcgcaggacatagatccctaacgatacaaacataaaggcgattaaggtcccagctgagattaattgcgctaagaaagcaaaaggaaacatggaaccaataataatgccgataattgttaaaaggcttaatgcatggttaggaagaccttttggatttacttgacctaaccatttaggtagcataccatcacgtccaaatgagtatagcagacgagaaccagccatcatcatgccaattaacgctgtaaacatcccaattacggcaattgcttgaatcacaccagcaattactccatgaccagcgtgtcgtaaagcccaaccgacaggttcagcattattagcgtaattcgtgtaatgaaacattccaactagcactagcgaaactgcaataaaaaggataacagcaattattaacgatcctaaaataccgcgaggcatagttttttcagggtttttagcttctccggcattagcagcaattgaatcaaaaccaatataggaaagaaaaatcattgaaattcccgaatagatacctttccatccaccaaaggaagttccgtctgggttggtatgatatttagggataaatggtaggtagttttgaatatggatagctgaaagtcccacaataataaatactaaaatagcaacaacctttaaaacaacgagtgcattttcgatgcgagcggctcctgtagttccatgagctaaaagtaacgctaccgcaataacgacgatcaacgcagtaatatcaatgattccaccattagtacctagaggatttgcaagttgtttgggaatttggattccaattgaggaaagcagtcccctaaagttagctgaaagtccggaggccacgaaggctacggcgatgaaatattccgctaacaaagcccagccggctacccaaccaaaccctttacctaagattacgttaatccaagagtatgcagatccagcaaatggcatagcggaagccatttcggcataagcaaaggctactaggccggcaactacagctgctgctaagaatgaaagtacgacggctggaccagcatgttgagctgcaaccacaccaggaagtgtgaagatggaggtggaaacgatcgtcccaaccccaagagctaaaaagtctttgactactagggtacgagtcaaatgagaatctttatcttcataaatagcaggattttcttttttaataaaatttttgatgaaattatgcaataatttaacctccttaaatagtagtatagactatcatatcatattctatcatttgtttttaatgtttagctaatcaaatttaattgtatttttaagtgaagaatgggaaatatttttgctaagttgatgaacgtgttagaatcaatatattattaggaggacatgcctttggattcaattaatgaaacacaaacaaaaatagcagctctaaggatggatctccgagttggaaaaatattttcttctttaggaaaatcagttggactaatcattgattcggcttcacaagatttaccagttactgaggtaaaagtcccccaagatgaagatgatgtagttgaattacttaaaattattaatgaacagttggggaagggagacatggacgaaattagtgatgataatattaatctactaatggatcacctaggctcttttaaagctcaaatccgtgatagtggagttttcactctttttggtgatttactccaatatgatattttaactaaaaatcaaaaaataatgatatttgatcgtttgattagtgaccagatgctcttgtcgcatattaatgaaacacagaatgatgcggcatatttaagagcatacacactaattttgttagcaactcttatctacattgatcgagctgggaccacttttattgatcctaaacgtcgatcaagattggtaaaccaaattgtactctatactatgctagaaaacgatacacgtggatatgaagacgggcgaggatggattcatgcctatacacatttgggtaacgttttagatgagctagcaagtgatgaaaagttagtccgagcggataaaattttattaatgtgtacagtgattgaaaagataaaaagattaaaaacaccgttaatttatggagaatctattcgtttagcggtatacattgccgaccaactatatgaagacgacgtatatcagcaatttttattgattgaacttcgcgaatggcgtcgctctttggaaacaattcaaatgagagagtccagtgctatgtggaatgctttatttaatcgtcagcgttttttgcaagccctcgttttaaatccggatatggccaattcaattgtggaatatttggaagattccaatgattttacagtataatttttaacttctatttcatcattgaactgattttatgatatactgaaggttcaataaacgtttgataattggcggagcaaactcaaggtttgtaattatcttacatacgaggtggaaaaaatgaaaattgctgtacttgccggtgggaaaagcacggaaagaaacgtgtcgctttcatctggttcaaagatcaccaatgctttgcgatcaaaaggttacgatgcaacgatgattgatttattcttgggatatgaacttgagggtggtcaaagttatgaagacgtatttaagtctagtaataccagtactgattatgaaatcagtgacgcagttttaacagaagaagatattgaagaacttcgtacagacggtacggttggattgtttgggaaaaatgttttaccaatcctccaagctgctgactttgtttttctagcgttacatggtggtgatggtgagaacggtaaagttcaagctgttttggatcttaatcatattaaatatacaggtagtggttcactagcttcaggaattgccatggataaagcaatttcaaaagagattatgttgtataacaacattaaaacagcccaatttgctgtattgcatgcaaaagatggtattcatcctcaattagcctttgactatccaatggttgttaagcctaatagtggtggttcaagtattggtactagaattgtgcatgatgaagccgaactagctgaatcattaaaggatgcctatcgttttgatgatgaaattattgtcgaagaatttatcactggacgtgaattttcactaggggtggtaaatggtcaagcaatgccagcaattgaaattgtggtaaatgatggttggtacgattatgaacataaatttcaaacgggttcaacgactaaattcgttactcctccagaaatcgaagatgatgttcatgatgaaatgaaaagggtagctgttcaaacaatggatgccttgggcatgactaactatggacgcgttgattttctaactaacgacacaggcgtatatgtaatcgaagccaataaccttccaggaatgacacctctatcgttattaccacaagaagcagaagcagctggtattagttatgaggacctttgtgaaagtatcgtattaggcaagcaaaagctttacgatgaattaaaaaaataaatttaaaatccctctttagagtaattaaaccctaaggagggattttttatgaaattaaaatgtacgtggtcaactaagaatgcaattttagaaaactatcatgataagatatggggaaagccatgttttagtgaccaagaactctttaaatgtctggcaattcaaattttccaatcggggttagatttacgaacggttttgacgaaattggaagcattaaatgaaatgtttgacgagtttaaagttcaaactgttgctggctatgatcagtctaaattagaagcgttgatggcatgtccattaatcattagaaaccaacaaaaaattaaagcagttatccataacgcagatgtgatcttaaaaatgtctcaaacggggatgtcttttaatgattttatctggtcaaaagtagattttgttcctatggatttagaacccaaaaataatgctaaaatgatgtttgatttaccaattgctagaagggtgtgtaaggacatgcaagagctgggatttcagtttgtggggcctactaacattagcttctttttacaagcaagtggaataattaatacacactgggtaaattgtagttatcgttaaaatggcgtaaataaaaagtacggcgatttaattttttaaactaaattgctgtactttattttattatttattttctaagtctgtgcgaacaaccaaaacatcacaaatggcggtacgggttacgtattcggtaacggaaccgattaataaacgttcaacagcgtttaatccagtagcaccaatcatgattaaatctgtatgaagttctttagggacatcttgagagattactacctttggtgaaccgtactcaatggaataagcaacattttctaatccatcattgtgtgcctcttggatatagcggtctaaagattttttagctgtatctgtgacttggtcgaccatggcggtatcgaaactcgaaatattttggaaagcacgagtatctataacgtggagtaaatgcaattctgcaccatcgttacgcttagcgacggcaactgcttttctaaaggctagctctgcttctttggaaccatcaactggaacaagaatatgtttatactgttgtgtcataacataaccactcctatctatttaccctcattgtacgttaaaaatgagaaaataaaaaggaatttgctataaaaattttaataaaaatagcaaagttccagtggtagaaaaaattcctaaaactaaagcaattaaaattagaacagtatttccagttattcctaacagtagagtaataatactaatgcctattaatatttttccaactacatttaaactttggctgagtaatttattagtagaaggtttaaatagcataaaatccgtggaacggtgggtatagaggtaataaccgatataaaagataataattgcaaaaatgaacataaagagctgaattagcataaataaatcctactttcttaatatataaaaaaaccccaccggagtggggcaaagaacttttagtagcgttcatatcggccagtatctaaccctagtaactaggtgggtgcacatacccaaacagcatgtttccttatacaaggcatacaattcacttgagatccgtgctcccgattagatgtttgttggaagaatatgaaaccgataattccgaatacctaagaacttcataattatcttactatactttttgtagaaaatacaatgttaatgattagaacgttgtgatttctttagactttcgtaccgatttttaattttctcttcataggtactattacctttggcctcaaaatatgcagcatcaaccaatttgtctggtagatattgctgagctatccagtcattaggataattgtgagggtatttgtaatctaccccacgacctaaagcagctgcacctttgtaatgagaatcgcgtagatggtctgggacttcaccaatctttcccgtacgtacatcggttaaggcattatcgattgcggtaatgcctgaattggatttaggagagacacaaagttcaatcacggcgtcagccaaaggaattcgagcttcaggcagtccgacgtgttcagcggccgtgacggcagaaactgtccgttgacaagctggggggttagccaaaccgatatcttcataagcaatgattaacagtcgacggataacactttgcaagtcgccactttccaaaagtcgtgccatataatggagagccgcatctgtatcactaccgcgaattgatttttgaaaggcagaaattacatcgtaatgagcatccccatccttatcttgggtgagagctcttttttgcagacattcttctagaatagctagtgttaagtgaattttttgattttcgtcaggaccagttgaacgcgcagccagttcaactgcatttaaggcgctacgcaaatcaccattagtggactcagatacaaattttaaagcatcttcatcaattacgatgggtaattcacctaaaccacgggaggaatccttaatcgcagcaaggacagcttctttaatttcatccggttgaagtggtttaacttcaaaaatttgagttctactacggattgccggattgatattgatataaggattttcagttgttgcaccgattaaaatgatattgccattttctaaatgggggaggaggaaatcctgcttagttttatccaagcgatggatttcatctagtagcagaattacagttccactcattttggcttcttcagccacaatttgaagatcttttttagaatcggtggcagcgttcaaaattcgaaaagcatatttagttgagcctgaaatagcactggcaatactagttttaccagttccaggaggaccgtataaaatcatggatgataaaagtttagctttaaccatgcggtcgataatttttccaggaccgaccaaatgttgttgaccaacaatttcttcgatagttcgtgggcgcatacgaaacgctaatggttgcattttttctcctaaaataaaaatttaaagtaaataaaaaaaacggccaaggccgtttttaatatgattatagcttgttgtagtattcaacgataagtgaatcgtcaatatctgcttcaagttcatcacgttgtggaagacgaacaagagaaccttccaacttgtcagcatcaaactgaacaaattgtggacgaccaacaacagcttcaacagcttcgctgataatcttaagatcttttgatttttcacgaacgccaataacttggccgatttctacttcgtatgaaggaatatcaacacgcttgccatcaacagtgatgtgaccatgatttaccaattgacgagcttgacgacgagtagttgccaaacctaaacggtaaaccatgttgtccaaacgacgttcaagtaaaaccataaagtttgtaccaggaagaccttcgcggatcttaccagcgcgaacaaataggtttgagaattgacgttctgttaaaccgtacatcatacgtaacttttgcttttcgcgaagttgcataccgtattcagaaatcttacgacggttattttgaccatgatcaccaggagcgtaaggacggcgagccaattccttacctgtacctgttaatgaaataccaagacgacgtgaaactttccagcttgggcctgtatatctagacataaaaatatcctccaataaattgtttttgttggagtaaaataaacaaatgtgggtttagtattcgtgcagattgctttgcaaggttcacctttgcagccgctgaggttactagttgacctgaaaaacaggcaacaatctgttgacgagcttaccgcccaccgctgcattattttacactcctactagtttaacgcactcaaaacagaactgtcaatgtgtttaactaatgcgtctctgaatttaatcagagtggcttcatcatcttcactaaaacgattgagaatcggtgagtcaatgtctaaaacacccaataattggttatccatcattaaaggtaagacaatttctgagtttgatgcactatcacaagcaatgtgtccaggaaattcatgcacattttccacacggagtactttattttctttaaaggcagttccacaaactcccgaaccgtttttgatgtgcatacaagccacatttccttggaagggtcccaggaacaattcatctttttttgaatcaaagagataaaaaccacaccagtttacatctttggtttcgctatacaacaaagctgaagcatttgaaagattggcaattaagttggtttcattaaacaaaagtgcatcaatctgttcgacaataattgagttaatcggttctgacattgtagtcacttcctatataatgtttaattaataaaaaatccctagtttaacaaactaatgggtatgatataattaattaggtaaattctaaattgaagaaagttaaaaggcaagttttttatcaattgaattgagtgaagttaagaaggatgggattttagttatgatcatggtattgattgcaatcatagtggtagcaattctagtttatttaggaattgtttcatatcaacgttatttacttaaacaaatcgatgaattattagatcgaaaagcagacatcagtgaatcaccggtgcgtcaaaaactaatggaagtttcctccatgaatctaactggatcatcggctattgggttagataacattcgaaatgactaccaggaaattattgatcatcgattaccagaaattgaagacattgctaaccattcgaaacaagatatcaatgatatgaagattttcgaagcgcgtaaggatgttacgacggttagtgaatctttagatgcaattggcgaagaaacgcgacgtcttaacgatcagttggataatattaaacgtacggatcaagaacaacgagatgcggttaaggtcttacgcatgaagtatgaagaaattagaaaaacacttctagctaagaacctaacgcttggtccaagcattgatttattagaagaaaaattagctcgtttagatgatgaatttgaaatgttcagtggaaccgtagaagctggagatcatgaaaaggctgaaggccaactccaaaaacttcgaacaagtacagaacaattagaagcacaaattcaaaacgttccacctttatatgaagaactaactaatgtatttccagagcaaattgctgaaattaaagatggctacgatcaattgattaatcataactatgcctttgaagatgatatcgttgatgacgagctgggtgctattaaagctaagatttcagataatcttgaaacccttggtaacttacgtttagatgctgtacgtgataacaataagtcaattgaaattagaattgacgatttatacagtatcttacaaactgagattgatgcacgtaagtcagttgaacataattttgatgtaattactcgcttcttaaatcacgctgaaaaacagaataaagttttgttagcagaagtggaacgtatggatcaaagttatgttttgagtgatgatcagttagtattaggtcaaaacttagatgctgaattaaatgaaattcgtaatgaacatgatcgtgatacagaacaaattactaaccaaccggttgtttactcagaaattgtggaacgtttaaaagctgaaaatgaccaactttctgagattgaagatcaacaagctaaattaaatgatgaacttcaaagccttgtagatagtgaaaaagatgcccgtgcaagaatgcaacaatatgacggtgaactccataacatcaaacgtcacgttgaaagtcttaaccttccaggtattccagaaggatacatggattacttctttgtggttagtgatgagattgaaaaagttgggagcgatatgaatcaagttcgagttaatatagacaagattaaccgagaacttgatatggtaagtacggatattcaaactcttactaagaagaccactgatctgacagacgatgccgctatcagtgagttagcaattcaatacgctaatcgttatcgtcatactgatcaagatatcgaagacgctattttgcgagctcaaaagctttttgatacggaccatcgttacaatgaaagtttaactgtaattacaaaagcactagaagaagttgaaccaggtgcagtggataatatcacagacaattactaccaacaaaaacgaactgaatattagaaaataaaatgctatcgtacttagtgcgatggcattttactttgaagatctaaatatttagattactttaattttgtaagtatatttttctgttataattattagggtttacggaaatatataatggagaaatgagtaaatgatttattttgataatagtgcaacaactaaagttgataagaacgttttagagacctaccaaaaggtcagtaataagatttggggtaacccttctagtttgcatgatatgggcgaaatgtcgttcaatttattggagcagtctagaaaacaaattgctagtttgttaaatgttaaacctcacgaaatattttttacaagtggtggaacggaaggcgacaactgggtaattaaagggacagcgatggaaaaacggatgtatggaaagcatctaattgcgacggctgtcgaacatcctgccgtaaaaaattctatggaacagttagcacaattaggatttgatattacctatcttcccgttgatgatgagggtcgaattaacattcaagatttaaaagatgccattcgcccggatacgattctggtttcgattatggcaattaataatgaaattggaacaattcaaccacttttaaaagcagcagaagttttaaaagactatccaaaagtacattttcatatcgatgctgttcaaggaattggtaaagggattcaagccgcaatcatgaatgatcgtgttgattttgtgaccttctccgggcataaatttcattctcctcgaggggtggggtttatttatgcgcgcgaaggtaggcgaattgcaccattgttaactggtggtggacaggaaaagaatttacggagtggaacggagaacttacctgcgatcgctgggatggctaaggcactgcgtttactacttgatggcgaagatcaaaaggtagctttacaagaatcaattaaagagaaaatttataatcacgtaactaagtttgaaaaagtggttgctttttctaaaattcaagctaactttgctccgcatattttgtgttttgcgattaaaggggtgcgtggagaaacgattgttcatgcgtttgaatcacatggaatttacatttcgaccactagtgcttgttcttctaaaaaacagcaagcttcaagtactttaacggcaatgaagattgactcaaccatttcaacgagtgccgttcgagttagcttagatagtgctaattctttggaagaagctgatgaatttaatcgaatttttgaccaattatatcaagacttttcaaaaataaataaaaatagctaggagtttatatgaaatatacggaaataatggttcgctacggtgaactatcaactaaaggtaaaaaccgcaaagattttattgctcgtttgggaggaaatatacgtaaaagtcttaaggactttgaagacgttgaaattcatcctaatcgtgaccgtacacatgtaaccttaaatggtacagacagtgatgcagtcattaacagacttaaaaaagtttttgggattcaaaatttttcgccaatgttaaaagttgagaaaacaatggaagctgtccaagctggtgctctagaaatgatgaaggagcaattaaagccgggaatgacctttaaaattaatacacgtcgttctgataaagaatttgctattaatacagataccatgaatcgggaacttggtggatttatactagataacttcccagataatgatgtaaaaatgaaaaatccagacattaccttacgtgttgaaattcgatctaatggaattttcttaactagtgaagtaattaatggggcaggtggcttaccggttggaactgctggtaagggaatgatgatgctttctggtggaattgattctcctgtggcaggttatttggggatgaaacgtggcgtagagatggaaatggtgcattttttcagtccgccatatactagcgaacaagctctagctaaggctaaggaattaagtggaaaattagctgcatattctggaagtgttcaatttatccaagttccatttacagaaattcaagaaactattaaagaaaaatgtccagagggttatttgatgacgattcaacgtcgaatgatgttgcgcctagtagttgccctagctaaacaacgtggtggactagcaatctttaatggagaatctctaggacaagtagcttcgcaaacaatggaaagcatgttagctattaatgacgtaactactatgccgattattcgtccggtagtttcaatggataaaaatgaaattattgacatagctaaggatatcgacacttatgacttatcaattatgccattcgaagattgttgtacgatttttgctccaccatcacctaaaacacatccagatctcgaaaagacgcgttactttgagaagagaattgacattgaaggattattggaacgttctttagcaggcgtaaaaattactaacattcgtgctgaagaaaactttatgaatcaaaatgaagaagtttttgctgaattattgtaaaggatttgtatattgattgaaatcagtgagtgtttgagataaggttaacgtaatttaaataaaggagcgtacaattatggaagtattacgcggtggagaaaaagttgaactcgttggaaatcctccaatgattggagaacaattacccaaatttaaagtttttactggcgatggtgaaaaagttaagacacgcgatttactgggtaaaccacttttaattagtgttgttccagatttaaatacgccggtttgcagcatgcaaactaaaaaatttaaccaagaaactgaccaatactcagatattcgatttgtaaccatttctaacaacatgcttaaagaccaagtagcttggtgcgcaaatgaaggtgttaagaacatggaagtattgtcagatcatgagctatcatttggttatgagatgaatctatatattccgaatgctggttatctagctcgtagtatcttcattgttgatgctgatggcaaaattatttatcgtgaaattgtaccagaaattcatgatgaacctgactatcaagctgcacttgattttatcaataaaatgtaaaagaataattgacgaacggacaattattctttattatttattctgaaggttatgactaagaggagagctgcaaaacttttttcagagaatagacatttttgctgagagtcttaaaaagttggagttcgggttgcttatgagccaattttctagatttaattctagaaaatcgaacaaattgttcgttatcaatgttaaagaggggcataatacgcccaatttaggtggtaccgcgaagcatcttcgtcctatgagttaggacggggtgctttttatttggaaaggaaagtgggattttaatgactaaagacgtagatatgtcgacaaagtacgacccccaaagcgttgaacatggacgctaccaaaaatgggtcgaacaaggacaatttaaacctaatggagatcaaaaggctaagccttattcaatcgttattccgcctcccaatgtaactggaaaattacatttgggacatgcctgggatacgacactacaagatatgttgatccgccaaaaacgaatgctaggatatgatactgtttggattcctggaatggatcatgctggaattgctactcaagctaaagtagaagccaagctacgagaacaaggtgtttcccgttatgacttaggccgtgaaaagttcattgaccaagtttgggaatggaaagatgaatatgccgatacaattcatcaacagtgggctaagatgggtctttctcttgattatgaccgtgaacgttttaccttagatgaaggtctttctaaagctgtcaagaaagtctttgtgaccctttatgaaaaaggcttaatttatcgtggtgaatacattatcaactgggatccacaagctcgtactgccttatccgatattgaagtggaacatcaagatgaccaaggtgctttttatcatgttaagtacttctttgcagatgaagagtttgaatttaacggtaaaaactatattgaaattgcaactactcgtccggaaactatgtttggggatgttgctattgctgtacaccctagtgatgaacgttataaagatatcgttggtaaggaagtcattcttcctctccaaggacgtcatttaccaatcatcgctgaccaatatgttgacccagaatttgggacagggatggtaaaaattacaccagctcatgaccctaatgatttccaagttggtaatcgtcatgatttgaagcgtatcaatacgatgaatgaggatgcttcaatgaatgaaaatgctggtaagtatgaaggtatggatcgctttgaagctcggaaagccatggttaaagatcttgaagaacaagattacatgattaagattgatccaattgttcatagtgtgggccattctgaacggacgggtgtgcaagtcgaatctcgattatctacccagtggtttgttaagatggataagttagcccaaatggcgctggataaccaaaaaacagacgataaggttaactttattcctgaacgttttgaacatacctttaaccaatggatggagaatgctcatgattgggttatttcacgtcaattgtggtggggacatcaaatccctgcttggtataacaagcaaactggagaagtttacgtgggcgaagaagcacctcaagatattgaaaattgggaacaagaccccgatgttttggatacttggttctcaagtgctttatggccatttacaacaatggggtggcctgatgagaattcagcagattttaaacgctacttcccaactagtacattagttactggatatgacattatcttcttctgggttgctagaatgattttccaaagtctagaattcactggccaacgtccgtttaaagatgtgttacttcacggtttaattcgtgacgagcaaggacgcaagatgagtaaatccttgggtaatggtattgatccaatggacgtaattgataagtatggtgccgatgcgcttcgttggttcttatccaatggttcaactgctggacaagatttacgctttagttacgataagatggattcggcatggaactttatcaataagatttggaatgctagccgttatgtaattatgaatttggatcaagttgaacagccaaaacttccggaattaagccaattaacattagctgataaatggattttgagtcgtttgaataaaacggttgaacaagttacgcacttctttgacgtttatgattttggtgaagctggtcgggcaatgtacacctttatctgggatgacttctgtgactggtatatcgaaatgagtaaagaaattttgaacggtgaagatgaacaagctaaggttaatactcaaaatgtattggcatatgttcttgatcaaacacttcgtttgttgcacccagtgatgccatttgttactgaaaaaatttggctctccatgccacatgatggtcaatcattagtgaatgcagaatatccggttgtacatgctgaactagaaaatcaagatgctgaagcgggaatggatcacttaattggattgattaaggcggttcgtaacattcgttcagaagctggggccccaatgtctagtccggttgatcttttgattaagactgatagtacaaaactaatgcaactctttaatgaaaatcgcgattatattgatcgtttctgtcatccagctaattttgaattaggggcagatgtagaggcaccaaaactttcaatgtcagcggtaattacggacggagaaatttacattccactagctgaattagtaaacttggaagatgaaattgcgcgtctggaaaaagaagaagctaagtacgaacaagaagtaaaccgtgtggttaaaaaattacaaaatgaacgttttgtaagcaatgctcctgaagaagttgttgcagctgaacgtgcaaaacaaacggattacgaaggtaaattagaagcaactaaacgtcgtcttgcagatattaaatctgaaagcaagtagctaacgtttaaattaacattaaagaactgcaaacaaaaagtgatttttgatgcggttcttttttgctagaagggggctcagtgatggattataaaacggctttggaatttatacacggacggccgcggttacgaaaagagccgaccgtaaaaagaatgactgcctttctagatcagttagggaatccccaagatgcaattcaaggaattcatgttgcagggaccaatggtaaaggttcgaccattgcttttttggccaaaatgatgggggctgctggacgacaagtagggacatttacttcgccttatttagaacgcttcaatgagcggattgcagtaaatggaagccctatccgtgacgatgagattctaacgttagtggaagaaatcaaaccaatcgtagacgagttagatcaaacgcccttaggtggaccattagaattcgaaattgtcacggccatgatgtttttgtattttaaaaaacaccccgtggatatagttttgattgaagtaggtattggaggaaggtatgattctacaaatgtcttcaccccgattgctagtgtaataacgaatattggttgggatcatatgcaaattctgggtgatacattacctaaaattgcttttcaaaaagcaggcattattaaaactaatgttccagtaatcactggaactgaagatcaggctgcgctacgagtgattgaagaggaagctaaaaagttacacgcaccgctaaaaattttgaaacgtgattttaaaattgattccaaggaaaattttttcagcaatacgttcgctcaaatcgatcatattcacagtggcttactgggtttatatcaagtaaataatttggcagttgctctagaaactatgttagtagttagtcgtcaattaaattggaagattaactatgatcaattacgacaagcagtccaacatactcaatgggctggccgaatggaaattattcaaaaacggcctaaaattattttagatggggcccataatttaccaggaatccaagcattaaaaaaatcgattcaagcgtattggccagaacaaaaagtttttattttagcagctattttagatgacaaaagatttgaggcaatgttgaccgagttagttgatttaaaacaagtagagttaacgttaactagatttaatgggccaatcaagcgtgctgctgtagactggtcagaactgcacgatccgattcgaaaagatattaattatcaagcgaattggcagtcggctttaaaagaaattttgcgtcaggctaaacctagcgacgtaattattattaccggatccttgtattttatttctgaggtacgcccgcagctaattaaataaagccggctgaatttccgtatgtatttaattagaggtgatgtatatggaaattcaagatggagcgaaagcaaaattaaaaaaagtcggtgctgaaaatttaagtaacgaagaacttgttcgagcttttttggatagttttggacaaagtcaaaaaattaaccagctaactaatcatttttgggatacaattggagacatagctggttacggcttactaagtcaaaatgaaaaaagaaaaatttttaaaaatcttccagatgctactgtagctttggagacgggtattgaattgggacgtcgaattcaaaaacaaccaatccatttactgggaaaggtactaggaagcgctcagttgggacaaatgatggtttcaagatttcaaaaggaaccgcaagaacacctgttggtattatgtttggatactaaaaatcaaattaaacgcgaaattgttgtttttaagggtggccttaactcggcagaagttcatcctcgagaaattatggtggaagtattgcgggttagtgcaaatagttttgttttaatccacaatcatccaagcggtaatatagagccttcaaccaatgatttagccttcaccaagaaaatgaaaaaagtcggcgatttaatgggtattcgcctaattgatcacttaattgtaggagatcaaagttactggagtgcagcagaaaaaagatttatttaatgattgataaacatttaggttattgcctagtttataatctttatatgttataatttatgaagtcattttaatgagataagttaaggggttcagggctcatgcataagtttttttctaatcgaaaattagttataacagtgatttgtgcaattatcgcggtaggtttaattgcaggttcacttacattgaaaaagaaagataagacgcctgttattcaaaaagtcggcaacgacgtttttggtacagttagtcgcgtgattgcattgccgattcatggtgtacaaacaatgaccactgatattaacaactttgtttcgacctacgaagaaaacgcacgtttgagaaaagggattgaaaaaaatgattcaatcaacgccgaaaataaaagcttaaaggctgagaacaaagaattaaagaaactagttggcctaaaagaaaccatgtcggactattcactaacagcagcaaccgttttaacccgttcaccgagctcatggcaagatttaattacggtaaacaaaggaacggctaatgggataaagaaaaatcaacccgtcttagccggtaacggattagttggtcgggtagtagaagctgattatacggtaagtaaagttgaattgattagtgataataatgaatccgctaatcgttttgccattcaggttcaagcaactgacggagaatatattaacggtattattactggctatgacaaaaagactaaccagattattatgggacaaattacggataaaaagacggttaaagttggaactccggtaacaacatcaggtcttggaggagttactccaaaaggactgtatgtcggaaaagttgctaaaatttcaaaagatgattatgggttagctagcgaaattcgaatcgaaccagcagctaaattaagcaatgttaacaacgtttatattgctaagttagattagggtgaaagcatgttacaatctgcaaaattaaaatatatttttcctatcgttttattgattgctttttttctagatggttcattaaatcaaattttttcgtcaactttatttcaatatccatattcgatgatttgtaatctaacgttgatgtggtttgtaatggcgatcttttttgaaggagaatctcaaattaatttcacattgtggtcatttgttattgggattatatttgattggtattatactggagtttttggcgtggatacttttattattccaatcgtagtgatgtttattcgtggaattcgaccttttgttaaaacaacattcttgatagtgttggggatggatatgtttgcgatggcgatgtataacatcttatttttcatcgtttttcaaatgattaagatggcgaatgtgactaccacatttttcatcggatattcgtttttaccaaccattattctcaatttatcaatttttgtaattctatattacccaattaaaaccgtatttagaagaacacggggaaccaattcaagaagttttatgtaataaggacttgaaagttttaaatataattgatattatttgtatactttagcaatgatcagaaaagtagtttatgtaatcttcgttaagcgagccgtggacagtggaagcatggtcaagaccataaatgaaacacatctgtaagttgataacttgaacaattaattagagttatccggtaattccgttatcatttaagttaattaactttctgaggttggttgcgtgagcaatcaacaaacttgaggtggaaccgcgattgaactcgtcctcttaggcttttggcctaagaggatttttttatgggttgggtggtgtgctactaaagaaggttaactaactttctgaggttatttatgtgagtaaataacgaatcaggggtggaaccacgattgaactcgtcctcttaggctttttaacgcctaagaggattttttatttattgaaaaggggaatagcgatgtttaacattaattatatttcagaaattataccatctttgttaagtggggcatcaatgacattacaggttttctgttggacaattgtggggtcattaattcttggtgtttttctagcgttgggtttagtatcaaaatttaaaccattccaagcaattataagtgcgtatgtgtggttaatgcgtggtactccattacttttgcaattaatttttattttttacggattaccaactgtgggaattgtatttccacgctacgaagctgctttactagcttttatcctaaactatgcagcctattttgcagaaatttttcggggaggattacaatccgttgataaaggtcaatatgaggcgggacgggtacttcagatgacctattggcaaacaactaagaaagtaattttgcctcaggtcgctaaaattgttctcccatcaatcggaaatgaagttatcaaccttgttaaagattcgtcattagtttatgtgattggaattggtgacttactacgtgcaggaaatgtagcagcggctcgtgatgtgactttggttccatttatcttagtcggtattatgtacctaatattgacagggatatgtacattcctgttacgtaaagtcgaaaaacactattcatactttaaatagggagggattaggttatgttagagcttaaaaatgttgttaaaagtttcaacggtaaaactattatcaataatttgaacttaaaaattcaagatgggaaaatattaactattgttggtccttcaggagcgggtaaaacaacccttttacgttgtattagcgggttagaaaaaattgattcaggtgaatttcttttagatgggcaaccgtttgatccatatgaaagtcgagacaatgaaagtgtaatcggagttgtttttcaagattttcaattatttcctaacttatcagtaatcgataacatcacgctgcctccaatcaatgttttacatcaaaaagaaacggaagctaaagaacgcgtgcaaaacattattgaacgccttgatttaactaaatttgtagaacaatatccatatcaactatccggtgggcaaaaacagcgagtagcgattgcaagagcgttagcgatgaaccctagtattctttgctacgatgaaccaacttcagcgttagatcctgaacttcgaaatgaagttagtaaattaatcttagacttgaaggaaaatggtattacacaagtaattattacgcatgatattgaatttgcagataaagttgctgatgatactttaacagtgaagccggtggattaaatgaaaaaagaattgaaattatttcttgtgatggctttgggactattaattattccagttctaggaggttgtggcaattcaaagaaaaccactagggccgaacctagtagttgggaaactattcaaaaaaataaaaaagtcgtaattggcttagatgatagttttgtaccaatgggatttcgagaaaaaaatgggcagcttgctggatacgatattgatttagctagagcagtttttagacaatatggaattaaagttgattttcaaacaattgattggtcaatgaacgtaactgaattgcgcaatcaaacgattgatttgatttggaatggattaacaatcactgatgaacgtcaaaaagcgttgacgctaagtgagccttatctaactaatcaacaaattatagtagtaaagaaaagtagcgggattaccaagttagcagatctgaaaaataaaagtgttggtgcacaaagtgggtcatcgggtgcacaagatattgatgaccatccccaaattttaaagaatcggattaaaaaccacgaccctattttatatgatagtttcaataacgcgtttattgatttgaatgctaaccgtatccaagggttactaattgatagtgtgtatgctaattactatattaagcatatgtcgaattcaagtgattatcggattataaagagtaatatgcccagtgaacaatttgcagttggaattaaaaaaggcaacactgaagttaaacaaaaaattgatcagggaattaatcaattaagggccaatggagaattaaaacgtatcaatcaaaagtggtttggaaaataatctgaaccttaagaccgaaaatttagttattttcggtctttttgatacactggagaaaagaatggcggaggaagatcattttggttcttattgagattgttttttacctaatcaatattatcatcgcgttaacgatcgcattaatggaaaagcgagatatttctgcagcatgggcttggttatttgtaatgctattgcttcctggaattgggtttataatttatctattttttggctggaagttaaatcaaaggcaaatatttgatttgaaagctcaaaaaagactcggaattagcgatatggctgaatatcaaaagcgtaatcctaaaaacaaaccgaccctggataccaatcttgaaaatgacttggttcagatgtttttaaacacggataatgcaattttaacgactaaaaatgatttaaagatttttacagatggtcatgaaaaatttaacagcttgtttgaagatttaaaaaaggctaaacatcatatcaatatcgaatattttacaatctatgatgatcagttaggcaaaaaattacgtaaaattttggttcaaaaagcgcgtgaaggtgtccaagtaagggtgttgtacgatttatttggatcaaaaggatccaagcaaaaattttttaaagaattaattcaggctggtggcgaagtcacgccatttatgaaatctaagctaggctattatagttttagaattaattttcgaaatcatcgaaaaattgtggtgattgatggatcggttgggtacattggtggttttaatattggtgaccaatatttaggacgtaataagcgctttggaaactggcgtgatacgcacttaaggttagagggttccgtggtattgcaattgcaaagtcgtttttttatggattggaatgcatccgctaagcgtcaaaaagttcaatttagcttagattattttccacaaagtaacgttcaaaataatattccaatgcagattgttagtagtggacctgagaatgatgttcaaaaaatcaaacagggttatattaaaatgattatgggggctaaacattccatttggattgaaacgccatactttatccctgatgatgccctaatggaagctttgttaatcgctattcgttcaggcatcgaagtgcggattgtaattccacaaatgcctgatcatcccttcgtctaccgggctacagagtattatgtacaacaattgttaaaagctggcgcgcgtatctattcatatcaaaatgggttcatgcatgctaagacgattgtggtcgataatatgattacaagtgtaggttcagcaaattgggatattcgttcttttaaattaaattttgaagcaaatgcatttatgtatgatcctaaagtggctgaacaaataatcgctacaattaaaaatgatttaaaggatgcgcgtgaattggatgaagaatatttcaagcaacaatcttcgtggaaaaaattccgtcaattggctagtcgtttgatttcaccaattctttaattaacattgaaaagtgtgcgaaatttcgctaacattaatcgcatgtgaaaaagtaggaggcatcatattggatgttcaaaatcagtctgggattcagactttagttttaccaagtaaaaaatttaaaactgtgcgcattgacgtacattttttgaaatacgcaacgattaaagatttagcccaacgctctttaattgctaatattttagatacaagtactaaaaagtatccagatcaagttcggtttacgcatgctctatcggaaatgttcggcgctagctttggtggaggtgctgctaaaaaaggtaatatgcatgatgtggctttctcaatggtagttgctaatgataaatatataaagcgccaaaacttaattcaagatgcgattcgctttttgaatgaagtgattgttcatccactagcagatggtaagcaatttgatgaagaaacattccaacgtcaaaagcaaaatatgttaaattatgttaaatcggcaacagaagataagcagtattggtctgcacaacaattacgtaaactaactttcggtcagaccgtggtacaaggtattccaagctatggattagtagaagatttagagaatctaaaaaatgcagaaacctaccgagcttatttggatatgcttaaaaatgatttagtgcatattagtgtttcaggggacgtcaatcaagaagagattgaggaagatttaaagatttttgaattagatgaacgccaatttgatttaaaacctttaattacacatttcgatgcacgggagaaagctatcgttaaggctgaacatcaagatgtacgccaagcacgcttaaacttatctttcaatattccggctgatatgactggagagaacttttttacggcagtcgtatttaatgctttattcggcggatcaccacaatctaagttgtttgttaacgtgcgcgaaaaagccagcttggcctactatgctagttcgagtttagatttatatgacggaatcttaaatatccagacaggtattaatggcgggaaccatgatgctgcaatgcaaattattcaacaacaactccaagacatgcaaaatgggctctttactgaaagcgaacttgctaacattaaaaaaggactacaatcagattatctttcggggatggacttgcaaagaaccgcacatcggcgtggattaaataattatctgttaaatcggcattggtcgacggaagaatggctaacccagattaatgcagtgtctaaaaaggatattgaacaattagctcagcaaattaaaattcgagctgaatatttcttgagtggagaataatttgaatgaataaaaaagtatatcaagcgttcaatgaatgcttattttcaaccgttctttccaacggtttaaaagttaatattttacccaaaactggatttaaaaaaacatacgctgttttaactactgattttggatcgatggatcgagaattcactttagatggtgaaaaaattcagattcccgctggcacggcacactttttagaacataaactttttgaaaaggccgaatacgatgcattcgaattgtttactaataacggagcagattccaacgcatttacaagctataccaagactagttatctattttcttcaacgactggattacaagagaatttagatattttgttagattttgttcaacagccatatttttcggataagtcagttgctaaagaacaaggaattattggacaggaaattcagatgtataatgacgattttgattggcaattatacatggggattttaaagaacctcttccccaatcaatccattagtgacgacattgccggaaccgtggaatcaattgctaaaattactccggagttgttgtacaaagtacataaagtattttaccgtcccaaaaatatgaatttatttgttactgggaacctagatccggatcagatccttcaatggattaaggataatcagcaacgaaaagagtttgcaaaagttaactttgaaattcctacttcagaatccgatgatgatgagattatcgaaaatcgtgcattattgactaaggttgaacgtcctaaagttatgttaggagttaaaaatgctaaagcattgcctcaacctggtattgaacgtctaagattcattattacgcttgatttggcgttatatttaatcttaagttcatcttctagattatatttagaattgtatgatgaagggcttttggacgacacttttggatacgatttaaatagtgaaagagaagccttgttcctaactttgggcggtgacaccaaccatcctactgaattgatacaagccttaaaagatattttgacaactggtttaatgaagtcggatgcgctcctcaaagatttcgagctagctaaaaaagaaatgtatggaagaagtattactaggatgaattctttggaagctattgctaattcatttgaaggtgaaaactatggaaatacgacaatttttgatgaagcaatgctttatcaagatatctctttagacgaagtaattaatactttcgatacctttatgaaaaatgttgttattagtacgtttaaaatggatagtgagcaggcgaagaaatgaaatttgcattaatttgtggagcaagtggcaatatcggaacagcgattagtaaagatttggctcaaaagggatggtcactttacttacattattatcaaaatgaggcaacaactaatcaattagccaatgagttacgggcagaatatcctcagcaagattttttaaccattcaagcgaatttcagaagcgaagacgctgctcaaaaaattagcaaaaatatttttgggttgaatgccgtggtttttgctcaaggaacgacaatctatcaattgtttgattgttttagtgcccaacagttggaaaatttgtggcaagaacagttaaaaacacccatgttagttattcaaaaggtaattaaaaaaataagcaacgctgaaaatggaagaattgtttttattggttcaatctatggaacagtaggcagttcaatggaggtaccttatagtgctattaagggggggattagtagttttgtaaatgcctactctaaagaagttgcttcactaggagttactgttaatgctgttgcaccaggggcagttgccactaagatgaacgatgaatttaatcaaacagaaattgaagcagttaatgaagaaataccggtgggacgtttcggtgatccatcagagatcagtcatatagttcaatcaattatggatgaacgggcctcttacctaactggtcaaacgatttatgttgatggtggatggaaaaaataatgatatacttatctttgatttagaaataagttgggcggtatacttatgagcactagaaaatacaaggaaattggtgagcgtctgcaagatgctcgtataaaaaaagggtggacgattgaagaagttcaatttaaactgcaaatttcaaaacgatatttaatggcgttagaagctggtgaaaatgatgatttaccaggtgattattatacacaatcactgattaagcaatatgccaatctacttgaaattgaccttggcagtcgcaacctaaaaagtgaaccgaatagtatcaaagaatggcgtcgtgcgcatgctgagatatcaagtcgtagtcaaaaagaagcacaacaacgaaaatcagttttgcaaggattaatccgacaacatccatggttgatgggaattgtattggtggttgttatttggcttttagtttggggagctttcaatgacatggctggacatactaaatctacgttcaaggtaccaaatcaggtcaaggtggttgatacaactaaagggacatctaccaagaaatatggtcagtcgaaggcaagttcttccaagaaggaaagttctagctcaaagaaatcggaggctacacttaaaaaaattaacaatagctccgataatttagaggtaacggtggctgcaggaagccagcatgctaacttaaagatgcagatgggtcaaagatcttggaatgtattgacggtaactcagcctaaagcagaaactacttggcaaggactgctagaagcaaaagctagcaaaacaattgaattgaaaaaaggttacacttatgcgcttaaaattggcgcctcaactgggtttacgggaacgattgccggaaaagaaatacctaaatcaactaccaattcggtggttcgaaatataacaattgaagtaaaataagagggagtatcaatgaatttacctaataaattaactatttttagaataattttaattccaatttttatcatacttacagtcatgccagaagttggtggaagtgtagtttggttgggaacaagtattgcagttaccaagatttggggggcacttgtttttgcaattgcatctattaccgattttttagatggacagattgctagacgtcaacatttagttaccaattttggtaaatttgctgatccaattgcagataaaatgttagtaatgactgcttttattgtcttagtagaaatgaagatggttccagcttggattgccgctatcattgtttgtcgtgagttagctattagtggattgcgcttaatcattgtggaaaatgatggtgaggtgctagcagctgaaatgcctggaaaaatcaaaacattctcgcaaatgttcgcgattattttcttgcttttgaataacattttctcaagtttcttacatttcggtctaggtacagtattattatatgtctgcttattctttactgtttattcaggaatcgattatttttataagaatcgggccattttttctgattcattctagtaatataaaggactatagcgaaatttatgattttgttatggacctttttttaatacaaaaaaataaaaacgagtaaaattacatatataagcattgaggaggaaaagaaatgaacgctgaaattatttcagttggtacagaaattttgttaggagaaatcgtcgatactaacgccgtttatctgagccagctttttgctaaattagggattgatgttttcaacaaaataactgttggagataacgaaaaaaacatcatggatgccttagaagtcgcttcgaagagaagtgatttagtggttacgatcggcggattaggtccaacagaggacgatatcactaagcaatccttggctaaatttgtcggaaaaaacttaaaacacgatcccgaggcgctacaacaaattgcagactattttaaaaaacaaaatcggccattgactaaaaataatgaacgtcaggctttattactggatggggctaaaccaattcataatcctaatggattagcccagggtattttttatcacacagagcaaaccgattatattgttttgcctggaccgccttcggaattcgaacctatggtggatgaaaaggtacttccgctactaagccagcaatatggtttggagaaaacaattcaatctaaaactctgcattttgttggaatcggtgaggcagatttagctgctcgagtagatgagattgttcgtaatcaaagcaatcctactatcgccctttactttaaaccaaccgatgtgacaattcgattgactgccaaagctaattctaagctagctgctgaggaaattttaaatcatactaaaaatcaactactagatcgagttggagaattcttttatgcagaaggtgacaaagtttctttcaccgattttgtcgttaatcaattgattaaacgcaatatttcattaacagcggcagaaagtttgacggggggagcttttgaaagtacggttgtagaaacttctggagcagcaaccatttttccgggaggatttgtaacgtatgctgatgaggtcaaaagtaagttgataggggttcaaccagcaacgattgaagaaaacacggttgtaagtcggcaagtagcggaagagatggctagaggggctcaaaagacgttagatacggatatagcggttagttttactggagtagctggaccaggggccttagaacatcaccaacccggaaacgtatggattggtttggctaaacgtaatgggtcaatagtcactaaagaatttaattttgttggtaaccgtgaaaagattcggcacctagccgtgatgaacggatttagaatgatatgggaaaatgttattaaataaaacattcgaacttttgttcgcttttttgttgatttttataaaataactatgtatcatactagtatagagaaaccctaggaggttattaattggcagacgaaagacaagaagctttaaataaagcacttaaaaaaattgaaaaaaactttggtaaaggatctattatgcgaatgggggatgcggttgatacgcaaatttcaacgattcccagtggttctttagcattagacgatgcactaggagttggcggttttcctaagggaagaatcgtcgaaatttatgggcctgaaagttctggtaagacaactgtagctttacatgcagttgctgaagtgcaaaaacgtgggggaactgctgcatatattgatgctgaaaacgcgatggatcctgcatatgcaactaatttgggcgttgatatcgattcactcttactttcacaaccagatactggtgaagaaggattagctattgccgatgctttggtatcaagtggtgctattgacctggtcgttattgattccgttgcagccttagttccacgtgctgaaattgatggagagatgggggatgctcatgttggcctccaagctcggatgatgtcacaagcacttcgtaaattatctggttcgattaacaaaactaagacgattgcgttattcattaaccaaatacgtgaaaaagtcggaattatgtttggtaatccagaaacaactcctggtggacgggctttaaaattctatgcaacaatccgtttagaagtacgccgtgcagaacaaattaaagatggtgccgacgttattggtaaccgtgttcgtattaaagtggtaaaaaacaaggttgctcctccattcaaaaaggctgaagtcgatattatgtatggtcatggaatttcgcaaactggtgaaatgattgatatggctgttgaaaaagatttggtcggtaagagtggttcatggtattcatacggagacgaacgcattggacagggtcgtgagaatgctaagaagtacattgatgaacatccagacgttcgtgcagaaattcttggtaaagttcgtgaagcgtatggtatggtagctgatcctacgagtgaagttaaaaaagaaagttccaaaaaatcttcaactgatgattcagatttagcttaaatactactaaaagattcaagaaacttttcttgaatcttttttgataggtttcaaactaaatgattcattgacactcttatacctaaatattaaaatgataataagtgtgaaaatcaaataacatcattcaagagatataactatggtcttgatgatttggaggcaaagatgataattttatatattatcctcgcaatcatcgctatagttgttggctattgtgcaggattctttatgcacaaacggctcattgaaaagcaaactgcaaatgccagtaattcggcagatgtaattgttgaaaatgcaagaaagcaagcagaaacggaacgtcgtgaaaagcttctagaagccaaggacgagagtcatcgctatcgggcgaaggtggaaaaagaattaaaagagcgacgggctgagcttcaaaagcaagaagatcgtttacttcagagagaagattctcttgatcgtaaggataattccttcgaaaagagagagaatagcctagaacgaaaagaacagaaacttgctctagaccaaaagcatatcgatgagcaacaacaaaaagcatcatcactcgttgaagaacgacaacaagaacttgagcgagtttccaatctaactcaagaagatgcaaagaacttaattatttccgaaacagaagctaagttggaaaaggaaagagcgttaataatcaaggaaggtcttgaagatgctgaagcagaagcagatcagactgccaggaaacttatcgctgaagctattcaacgcagtgcggctgatatggcatctgaaaccacaattacggtggtttcgttgcccaatgatgatatgaagggtagaattatcggacgtgaaggccgtaatattcgaaacttccaaaatgtcacgggagtagacttgatcattgatgacactcctgaagccgtggtattgagtagctttgacccaattcgtcgcgaaattgctcgaattgccttagacaaactgattcaagatggtcggattcatcctgctcgaattgaggaaatggttgaaaaagctaaaaaagaaatggatgacaatattcgtaagactggtgaacaagcggtctttgatttgggaattcattctatgaacccggaactaattaagttaattggacaattaaaatatcggacgagttatggtcaaaatgttttaaaccattcaattgaagttgctaatttagcaggtgttttagctgctgaattaggtgaagatgttactgtagcaaaacgcgcaggattattacacgatattggtaaagcagtacaacatgaaactgatacttcgcacgctcaacttggagttgagttggctaagaagtataaagaaagtgcaacggtaattaatgcaattgccgctcatcacgatggtgttgaagcacagcatgttatctccgtattggttgctgcagctaactcgatttcagcagcgcgaccaggggcacggagtgatacactacaaagttatattcatcgtttagaaaaactagaacagatttctaataattttgatggagtaaagaaaagttacgcaattcaagctggacgtgaagttcgcgttatcgttaaacctaataagattaacgatttgaaggcggttatgttgacccacaatattcgtaaggcgattgaaaaagagctcgaatatgctggaaaagttaaagtaacggttgtacgtgaagttcgagcagttgattatgctaagtaaaggagagttggactagcggtccgctctttttttgttatatgttagaatatccattgttaatgtattttttacgtatttaaaaatatgagagaaaaagctggaaggaaaaaagaatgccacaaaaaacaagtgatacgccaatgatgcgtcagtatatggaaattaaaaatcaataccccgatgctttcttattctatcgaattggtgatttttatgaattattttatgatgatgcggtcaaaggctcccagctattggaattaacgctaacagcgcgttctaaaaacgcagatgatccgatcccaatgtgtggagttcctcatcatgcagcacaaaattatattgatatccttgtcgaccaaggatacaaagtggcaatttgtgaacagatggaagatccacggactgctaaaggaatggttaaacgtgaagttatccaattggttactccaggtacaacaactgataagagtgctgaggatgccaaagaaaataactatttgaccgctgttaattttgattctaaaactaaaaaatatggctttgcgtatacagatctttcaactggtgaattaaaagttgcgattttagatgattttgatagcgtgattaatgaagcagtaggattacagaccaaagaaatagtaactgacgaaagccttgcagaaagttttgaagaacgttttaaagagttaaatattttagtgtctaagcaaagtaaagtggaaatatccgctgaattaagctatttaattcaagatttaacaagttcaacggaaatagaagttgttaagcaactacttacgtatgtgcaaactacgcagaaacgtaatttagctcatattcaaaaagcagtggcatatgaaccatctttctttttgagaatggaccatgcttccaagtataatttggaactaactcgtttaattcgtacaggaaaaaaacaaggaacattactgtggctgttggacgagactaaaacggcgatggggggacgtttactgaaacaatggttagatcgtcccttaatccgcaaaaaagaaattattagccgccaagatcgagttcaggttttagtagatcatttttttgagcgtagtaatttacaagaagagttaacaaaagtttacgatttggaacggctagctggtcgtgttgcattcggtagcgtgaatggacgagatttaatccaactcaaaacatcattacttcaaattcctaaggtacgtcatattttagaggaacttagtgagccggtctttgatgatgctttagaacatttggatccggttagtgatattgccgagctaatccaaaatgctattgatgaagatgcaccaatttctgttacagatggggatattattaaagatggttaccatgctaagttagatgagtaccgagatgcaatgcgtaatggtaaaaaatggattgcggatttacaggtacaagaaagagcgacaacgggaattaagacattgaagattggttataacaaagtttttggttactatatcgaggtaaccagagccaatttagctaatattcccgaaggacgttatgaaagaaaacagactttaacaaatgcagagcggttcattacgccagaattaaaggaaaaagaacggattattctggaagctgaacaaaaatctacggatttggaataccaattatttaaagaaattcgggaattaatcaaaaagcaaattgaaagattacaagatttagctaaacaagtggccgaattagatgtcatacagagctttgcggtggttagtgaaaaatatcagtttgttaaaccaactatgaccaaaaatcatgcaatcgaaattaaagatggccggcatcccgttgtcgaaaaagtgatgggacatcagagttacgttccaaataatattgatatggatgataatacagacattctcttaattacgggacctaatatgtcgggtaaaagtacctatatgcggcaacttgctttgaccgtaatcatggctcagatgggatgttttgtagccgctagtgaggcaactttgccaatttttgatcaaatatttactcgaattggtgctgcagatgacctaatttccggacagagtacttttatggttgaaatgcaagaagcaaaccgagctttgaaggatggaaccagtaatagtttagttctttttgatgaaattggtcgtggtacagccacttatgatggaatggctttagctcaatctatcattgaatttattcatcaaaatgtccatgctaaaacgcttttttcgactcactatcacgagttaactgagctcgatcaatcactagaacatctcaagaatgtccatgttggagcagtggaacaaaatggtaatcttgtctttcttcataaaatggaagacggccctgctgataaatcatacggaatccatgttgctaagctagcagggatgcctgataaacttttaaaacgtgcatccgtcattttagaaaaacttgaggctaaagatcaagctcattctgatggggttgagacaccagtctccaaagcaactccggttgaatcagagcaaacgccaaccatgattgaagaacaaatgactttgtttgaaacacctactaagccggttaaatcaagtcctaaagaagaagttgctaaccaactggaacagttaaatttaatggatatgactcccatggaagttatgaatcagttatataaatggcaaaagaaacttcgtaagtgaggtgattatttttggcagaaatacgtgaattaagtgaaattttagcggatcagattgcagcgggtgaagttgttgaacgtccagcttcagtggttaaagaattagttgaaaatgctatcgatgctggtagttctcgaattgatattttgcttgaagagtctgggttaaagatgattcgaattattgataatggtagtggaattgatgcaaatcaagttgagattgcttttaaacgacatgctacgagtaagatttcgtcgcgttcagacttatttaaggtggggactttgggttttcgaggggaagccctacctagtattgcttcaattgcagatgttgaaatgttgacagctacaactgatggaccgggtaaaaagattcattaccggggtggcaaattagaagatagcggtgatgctcaaagtcgccaaggtacggatattactgtacgggatctatttttcaatactccagcacgtttaaagtacttaaaatcgctccaaacggaattatctaaaattacggatattgtcaatcgcattgcactaagttacccagaagtagctatctcactacaaaataatgagcgtgagctaatgcgaacctcaggaaacggaaatattcaacaagttttagctaacatttatggtgccaaaaatgctcaaaaaatggtacatgttaaagaacaaaatattgactttacgattgatggttatattagtttaccagaattcactagggcaaatcgcagctatatcacggttctagttaatggacggtatatcaaaaatttccaaatcaataaggctattattgatggttatggttcaaaattaatggttggtcgttatccagtagcagttttgaatattaaaactgatccaattttagtagatgtaaatgtgcatccaactaaacaagaagtgcgcatcagtgaagaacagacactgttagatttaatttccaaagccgtttttaatgaacttgcagataaaaatttgattccggatgcagtagacaatttaaaaaagtcacgtgtaaaagtaagttcaagtgaacaacttgacttagctcggatggccatatcgggttcttttggtatggaacaggatcatgtaacgattccagatacagataacgacgaagttgaaaaagaagtaaatatctcggatcgatatgtggaacctgaaccaattgttattaatagtcgccaagatttaaaatctgataccattgccgaatttaaaaccaaatacgctaacgatgcagtagttaacaatgcggttaaagacggggatcagcctgaattaaaagagaaagacgccgtacaacgttttccaactttgacttacattggacaaatgcacggaacatatttgtttgccgaagctgaggatggtctctacattattgatcaacatgcagcgcaggaacgtattaattatgaatattatcgagttcaaattggagaggtcagtgatgatcagcaggacttactagtgccaatttacttagattattcaactacggatgctatccgaattaaagaaaagcaaacagtcttagagtcgtgtggattgtttttagaagaattcgggaaaaatacgtttatcgttagacatcatccaacgtggttcaaaaaagggcaagaggaagacaccgttaaagaaatggttgattatgttttaaatgatagctcaatgacggtagctaaatttagggaagcaaccgccatcatgatgagttgtaaacgagctattaaagccaaccatcatttagatgaaccacaagctaaacaattattaaaagacatcgctaaggctgaaaatccatttaattgtcctcatggtcgtccagtactagtacatttttcaacgacagacatggagaaaatgtttaaaagaattcaagatccacaccattctgacttgatggaagatgagatgtgatacaattaactgaatgcgaacaaacgttttgaaatgaggatttataaatgtatgaatatttagatggagtcgtcgttaacgttaatccagcttatattgttgttgatgtcaacggagttggatttttagttaacgtggctaatccatatagttttgaactagatgctaaacagaaagtttttgttcatcaagctgtttcagaaaatgatcaaactttatatggatttaaaaaagctgaagataaagaactttttcttaatttattaaaagttaaggggattggtccgaaaagtgcgttggctattttagcgaacgatgatcatacagggttgattaatgcgattaataatgatgatgtaagttatctcaaaaagttccctaagattggtcctaaggctgctcaacaaatcattctagatttgaagggcaaagtggcggttgaaaatgaagtaggaaccctttttgatttatcaactacttcaaaccaagctctagatgaagctctagaagctttgattgcattaggttattctgaaaaagaggttaagaaattaactaagaaattgagtgaacaaactgatcggacaactgatcagtatattagttcgggattaaaattattgatgaaaggataagacaagttgatggaagatgaacggattacttctgcggaagttcaaagtccagacgaagaaaatgaagagttgtcgttaaggcctcaaacattgcatcaatatattggtcaggatcagattaaacatgagcttgaagtatatattgccgcagccaaaaatcgcgaagaagcactagatcatgttcttttatatggcccccctggactagggaaaacgactttagcgatggttattgctaatgaaatgaacgttcagattcgaacgactagtggaccagccattgaaaaaccgggtgatttagtagctcttttgaatgagctacaacctggtgacgttttatttattgatgaaattcatcgattacctaaagtggtggaggaaatgctctattcagccatggaagatttctttgttgatattgttgtcggacaaggaccaactgcacatccaattcattttcctttaccacctttcactttgattggagcgactactagagcgggcttactctcagctccattacgagaccgctttggaattgttgaacatatgaattactataatgaagcggatttagctaacattgttcgacgctctgcgggtatttttaactcgcatattgacgatcaaggggcgtacgaaattgctagtcgctcacgaggaacaccgcgaatttcgaatcgtctgttaaaacgaatccgagattttgctgaagtagaaaatgatggacaaattgatcgccaattggttagtcagtccttgaaattacttcaagtagataatcgtggactagatcggactgataaaaaagttctaactactatgatcgagctctatggaggtggtccggtaggaatttccaccattgcagctaatatcggtgaagaaccagatactatttcagaaatgtatgaaccatacttgcttcaaattggattcctgaaaaggacgcctcgaggccggatggttacagaacgtgcctacgaacatctaggcttaattgatcaatatatgaataaatgaggaattgaaaatgacactaactactgaagattttaattatgacttaccacatgaattaattgcccaaactccaattaaagaacgcgatgaatctcgtttacttgtgttagaccacgaaacaggagcaatggaagataaacatttttacgatattatcgaccaattaaatcctggtgatgcagtcgttatgaataattcacgagtaatgccggctcgtatttacggaattaaggacaaaacgggtggtcactttgaagttctactattacacaatattgaaggcgaccgctgggaaacgctcgttaaacctgctaaacgagcaaaaactggaaccaaaattatatttggtgatggtgccttgacagcgacagtcaccaaagaattagaacatggtggacgtgagattgtctttgattatgatggaattttcatggaagttttggaaaagctaggagaaatgccgttacctccatacatcaaagaaaaattagatgatccagaacgttatcagaccgtttattctaaagaaccaggttcagcagcagctccaacggctggattacactggactaaagaactactagaaaaggttgaacaaaagggcattaaattagtttatttgacattgcatgttggactaggaactttccgacctgtggatgaagataatattgaagatcacaagatgcacagtgaattttatcaactttctgaagaatcagcggcagccttgaatgaagtgaagaagcagggtggaagaattgtggctacgggaacaacttcaattcggacgcttgaaacaattggctctaagtttaatggagaaattaaagctgatagtggttggacggatatttttattaaaccaggttatgaatggaaagtggttgacgcttttataactaatttccatttaccaaaatcaactttggtaatgctagtagcggcctttacgggaagagaaaatattttaaatgcttaccaacatgcgattgaagaaaaatatcgtttctttagctttggtgacgcaatgtttattaaataaagaactatgaatggagaaatacattggaacctgcaattaaataccgattaattaaaaccgataagcatacaggagcacgtctaggtgaaataatcaccccacatggtacttttccaacaccgatttttatgcccgttggaactcaagcaaccgtcaaagccatgtcacctgaagaactagaagacttaggagcagacattattttgtcgaatacctatcatttatgggtgcgaccaggtgaagatattgttaaagaaggtggtggtcttcaccaatttatgaactggaaaaagggaatcttaactgattcaggtggatttcaggtattttctttagcgaaattacgagatatcactgaagaaggggtgcactttaaaaacgagcttaacggagcaaacatgttcctttcaccggaaaaggctattcaaattgaaaatgatctgggtccagatatcatgatgagtttcgatgaatgcccgccttattttgagagttatgactatgttaaacattcggtcgaaagaactagccgttgggccgaacgtggtttgaaagctcatcgtaacccagaaacccaaggcctttttgggattattcaaggtgccggtttcgaagatttaagaagacaaagtgctaaagatttagttagtatggatttccctggatattcaatcggaggactttcagtaggagagtctaaagaagaaatgaatcgggtgttggatttcacaacgcaattgattcccgaaaataagccccgttatttaatgggagtaggttcgccagatgctttgattgatggtgttcttcgtggggtagatatgtttgattgtgtattaccaacccgcattgcccgaaatggtacctgtatgacgagtcatggtcgtttagtagttaaaaatgctaaatacgcgcgtgatttcacaccaattgatgataattgtcaatgctatacttgtcgcaactacactcgggcctatattcgccatctaattaagaccgacgaaacttttggtcttcgactaaccagtattcataatgtctatttcttagttcatttgatgaaagatgtgcgtcaagctattatggatgataatttacttgagtttagacaaaacttctttgaagaatacggatataataaggaaaatagtaagaatttctaagagtactggtttagaaaacgtatttttggtacagtatacttagacgactttagtgaggtgaaaaaatgttattagcagctgcaaatggtggtttcggaatgagttcaatcattttctttgttttaatcattggattgatgtacttcatgatgatcagaccacaacgtaaacaacaacaaaagcgccaagaaatgatgaatcaattgaacgttggagacaatgttgtaacaattggtcgtcttcatggggtggttgattcaattaatgaagaggaaaaaactgttactttagattgtgatggtatttacctagtttttgatcgtatggcaatcatgcgggtcgaaaagaaggctcttacgacaactgaaacaactgaaactaaagaagaagctcccgtaaaggaagccgaacctgaagaaacaactgaaaaagaagaataatttttcaaacttagaccgcgaattttaattcgtgggtcttttttttcttgtttgaagttttaaaatggtagataattaatctattgaaaagcgaaagcggggttataaaaatgaatcaaaaggctttatttattatttttggcggaacaggcgacttagcttatcgaaaattatatccggcgttatttaatttatacgaaaaaggatatttaaaagaggattttgctgtaattggtacagcacgccgtccgtggtctaacgatcactaccatgaagtagttatgagtgcaattgaagacgcaggccgtgattctggtcggactaacgatgacctacctcgcaaatttgcaagtcatttttactatcaatcacataatgttgatgatgtcgatcattatgtagctttacgtaaattagcagatgaattggatgaaaagtatgatcttcaaggaaatcgtattttttatttagcaatggcaccaagattctttggaacaattgctggccatctgaaagatcaagctttacttacaaagggaaatggttttaaccgattaattatcgaaaaacccttcggacgtgattatcccagcgctaaagaattgaacgattcaatttcgggttcctttaaagaagaacagatttttagaattgatcattatttaggtaaggaaccgatccagtcaattgctggattacggtttgggaacgcattgttcaactcgctttggaataaagaacatattgataacattcagattaccctatctgaatcacttggtgtcgaagaacgggctggatactatgaaacagctggggcaatgcgggatatggtccaaaatcatattatgcaaattgtttcgttacttacaatggaacggccagatgtttttgattcagaacatttacgtgacaagaaaattgaagctttggaaaatatccaaatgtataccaaagaagaagctaaaaaatatttcattcgtggccaatatggtgcagatgaggctaatacacaacttggataccgagatgaagaaggtacggataatcaatcaactgttgaaactttcgttgccggtaaattaattacacataatccatcattagatggtgtaccagtttatattcgtactgggaaacgattaactaaaaaatcaactcagattaacattgtatttaaaaatgatgatcaaaacatttttgctaaagacgcgtcagaaaaattaaagaccaatgttttgactatgcatattgaacctgatcaagggtttacactagaatttaatacaaagactggaaaccaaggttacaacctttccccagttcatttacgttatcgtaagacagccactgaaaaggctcaaattccagatgcttacgaaggtttgattcgcgatgctttaatgggaaataagactaattttgcacattggcatgaagttagccaagcatggaagattatggatgtagtccgcgaggcttgggatgaagaagaacccgcatttccaaactatgcaagtggtagtatgggacctgaagcagctatgcaacttctagctgatgatggacgtaaatgggtttttaatccacgcagctaataatggaaacagaagttttaactccgatcaacattgatgattctcgtaagataattcatgttgatatggacgccttttatgcttcaattgagatgcgagataaccccaagttcaaaaaccagcctttggtggtagctcatgatccgcgccttactggaggacatggggttgtcacaacggcaaactatattgcacggcaatttggtgtccattctgcgatgccggctatgaaagctttagaactttgtccagaggcgatttttaaagatccggacttcactaaatatcgtgcagtttcggaacaaattcatcaaatttttcacgagtataccgataagattgaacccgttgcctttgatgaggcctatttagatgtttcagaagataaaaaggggcttggtgacgctgtgttgattgctcatgaaattcagaaagttatctttaatgaaacccaattaacctgctctacgggaatttcatacaataaatttctggctaaaatggcttccaaatattccaagccagtaggtgtggcaatcatcgaaaaagatgacgttgctgagtttctaaagaatattccaatcgaacggtttagaggggttggcaaaaaaacagtgcctaaaatgcacgagctaggtgtttttcaaggtgcggatttaatcaaggtgtctgaaaatgatttaattcattactttggaaaatttgggtacaccttgtttcgttgggttcgcgggcaagatgatcgcccagtcgaatacttgcgtgaaagaaaatcaattggcaaagaagaaacgtatggaaagttgctcaccactgagatggaggttgaagagcgacttcgggtaattgctaagaatttacttcgcacagttttgaaaagacagaaacacggcaaaaccattgtattgaaactaagatatggtgattttgaaacgttaactaaacgaatcacattggacgaatttttccaaaatgatgttgaaacctattatttttatgctaaacagattttggatgaaattgctgatatttcgcgggggattcgcttattagggattacactaaccaacttaacggatcaaaattttcaagaagtttctttaccactgtttaagcactcagagtgattttgtgatatgcttaagagcgctaataataaagtattaaacttatattgataaaaatttaatgagtaggataaatgaggctgtaatggacacacttgaaaaaattttagaacaaatcaaaaaatataaccgaattattattcatcgtcatcaacgtcccgatcccgatgccattggatcacaagttggactcgccaaaattttacaagcatcttttccccataaacaaatcaaagtggttggaaaacaaatcgatggtttgagttggttgggtaacatggatgaaattgaaggtgatttcttcgatgatgcattggtaattgcgattgatacggccaattcaccaagaattgacgatcgtcgctttgagaacggggcgttcctaattaaaattgatcatcatccaaatgatgacccatttggcgatttgatgtgggtgaaagaagaagcatcaagcagttcagaattagtttttgatttctataatcgcttcaaggaccaattaacgctgacagcagacgcggctagagatctctatgcgggaatcgtgggagatactggacgctttatgtatgcagctactagtgcacatacgcatagtgtagtagctggtttaatggaaactggctttgacatggtagctgttaatcagacgttagacgaaataccagaatcagtagctcatttatcatcatacgtatatgacaaccttcaaattaaggctaatggggctgcccatattgttttaagtaaagaagctttggataagtttgatttgaaggacgctggaacagctggaattgtttcactaccaggtcatattacaacggttaaatgctgggcaatttttgttgaacaagatgatcactcttaccgtgttcgacttcgttcaaagggtccagtgatcaacgaacttgcaaagaaacacgacggcggtggtcatccattagctagtggtgcgaaggcagctaacattgaagaagttaaccaaattgtaagtgaattagatcaattggtttagacaaggagtatttaatgaacgaatttcagaagtttaatctaaaaccatttttaatgacggctttagatgagattaattttaagacacctacccctgtacaggataaagtgattccacttattgctgatggaaagagtgttgtcggacaatctcaaacggggagtggtaaaacccatgcttttcttttaccaatttttaacaatatcgatccggaattaaatgcaattcaagcagtaattacgacacctagtcgtgaattggcttatcaaatttatgaagatgctaagcaattagcctcagcttcagaagttaagattgaaattggcaattacgttggtggaactgataagaaacgtcaagttgaaaaattaggacatcatcaaccagctatcatcattggtacaccaggacgagttttggacttgttaaaggaacgggccttgaacttccgtcaagtgaagtatatggttattgacgaagctgatatgaccttagatatgggatttttaaacgcggtagatcaaattgctgctgcaatgccatctaagctgcaaattttggttttctcagctaccattccacaacggctaaatgtatttttgaagaagtatatggatcatccggtaattgaagagattcctaccgaaacaactattagccctaccatcaagaatatcttgatttcaactaagagctctggcaaaaataatttaatttataaattattgactatgggagagccctatctagctttagttttcaccaacactaaggaacgtgctgatgagttgaccgattatcttaaagctcagggactcgatgttgctaaaattcatggtggtatccaaccacgtgaacgtaaacgaattatgaaagatattcatcgtcttcgttatcaatacgttgtagcaactgatttggctgctcgtggaatcgatattgatggagtttcactagtaattaatgatgatattccgacagaccttgaattctttatccatcgagtgggtcgtactggtcgaaatggtatgtcaggaaccgcaattaccttatatatgccaaatgaagaagacaaagtagctgatgtcgaaaagatgggaattacattcttacctcaacagattcgaaacaacgaattagttgatacgtacgatcgtgatcgtcgtcagacgcgtcgtctgagtcaaaagaagcttgacccaaccatgattgggatggttaagaaaaagaagaaaaaggttaaaccaggttacaagcgtcgaattcgcaaagcaatttcagaaaaagaaattcgtgatcgtcgtatggaacaacatcaagcagttcgtgaagccaaaaaggctaagataaaacaatcacgaaataagcgaagataaattgacattttaaagttgattttctataattagctgtaatatttttaaaatcatttgagatatgtaggagctaaccccttagtgcaagagacattctggctggtgtgaagggtgaagggaagtttctatgctactcaagttaatgaatcgttttctcagcgttaatgagacttaagaggtatacgattaaacatcgttgcaagtaaagtggtaccgcgcagtcgcgtctttattattttacgtgcaatggtgttttttattttaggaggaaataatggaaagaaagtcaagtagtgaaattcgtcgaatgtatttagattttttcaagagtaaaggtcacatcattgaacccagtgcctcattagtaccgcaagatgatccaactttgttatggattaattctggtgttgctaccatgaaaaagtactttgatggaagtgtggttcctgaagtacctcgtctaacaagttcacaaaaaagtattcgaacaaatgatattgaaaatgtgggtcatacggctcgtcaccatactttgtttgaaatgttgggtaacttttcagtaggagattattttaaagaagaagctattcattgggcttgggcattgctaacatccaaagaatggtatggcatggacccagaaaaattgtatgttaccgtctatcctaaggatgaagaagctaaaaaaatatggttagaaacaccaattgatcctagccatattgtggaagtggaagacaatttctgggatatcggtgagggtcctagtggtcctgattcagaaattttctatgatcgcggtgaagcatttaataatcttgaagatgacgatccagaaaattatcctggtggagaaaatgaacgctggcttgaaatttggaatattgtattttcacaatttaaccataagccagatggaacttatgaaccacttccacataaaaatattgatacggggatgggattagaacgagttgtttctgttttccaagatgcccccactaactttgaaacagatttattcttaccaattatccatgaagttgaaaaacttagtggtaaaaagtatggagaaaataaagaaagtgatatctcatttaaggtaattgctgaccatgcacgggctattacgtttgctattggtgatggagctattccttctaatgagggacgtggatacgttattcgtcgcttattacgtcgtgcggttatgcatggtaaacaactgggggtaaatgaaaccttcctttacaagatggttccagttgtaggcgaaattatgaaggattactatccagaagtgttggctgatcaggattatattgccaaagttattaaatctgaagaagatcgttttagcgaaacacttacagacggactagaacttttaaatacaattattgatgaaactaagactaagggctccgacacaatttctggatttgatgtctttcgtttgttcgatacttatggtttcccactagaactagctaaagaatatgctagtgataaggggctcaaagttgacgaagcaggttttgaagatgaaatgcagaagcaaaaagaacgtgcccgttcggctcgatcaacagaaaaatcaatgggagttcaatctgatttattaacggatttaaagactgaaagtaaatatgttggttatgatactcttcgagttgataatgcaatccttgaaaatgtaattcaggatgggaaattaacagatattgtagaaccgggtgaagcccgcgtcttatttaatatcacacctttctatgctgaaatgggtggacaagttgcggatcaaggtgaaattagggatgccaatggcgaaattgtggcggaagtgattgatgttcaacatgcacctaatggtcaaaacttgcatactattaaagctttaaagaagatgcacagcggagcagcttatacattagaagttaaccgagctttccatttgaaagttgaaaagaaccatacagctactcatttattagaccaagcgctacgtgatattttgggcgatcatacacaacaagcaggttcgttagttgaaccaggttatttacgttttgattttacgcattttggacaagtaactaacgaagacttggatcgggtcgaaaaaattattaacgaaaaaatttatgatgaaattccagtaacaacggttgaaacggaccttgaaactggtaagaagatgggcgccattgccttgtttaatgataaatatggtaaaaaggtacgtgttgttggaattggcgattattcaaaagaattttgtggggggacccatgtcaagaatactaatgaaattggactctttaagatcgtttcagaatccggtgtgggagctggcgttcgccgaattgaagctgtaacttcacaggccgcacttgaattcttaaatactgaagaaaaccttttgaagcaaacagctggtcttttgaagagtgctcaattaaaagatgttcctactaagactgaacaacttcaatcaaatgttaaagcattgacacaaaaagttagccaattagaagctaagattgctaaatcccaagctgctaatatcggcgatgaaatggtagaaattaacggagtgcgtttaattgctgctgatgttcaagtttcaggaatggatcaattacgtcaaatggctgatgattggaaaaataaagatcaatccgatgtcctagtcttagctgctaagattggtgaaaaggctaatttaattgctgctgtcaaagatgattttgttaaaaaaggtcttaaagcaggagatttaatcaaagcaatcgcgcctaaagtaaacggtggcggtggtggacgtccgaacatggctcaggccggtggttctaatccggataatatcaaggctgctttgcaagccgctcgagaatggctagaaagtcaaaatggataatattacgagttagttacgagaagctccattcattgtgatttaggtgctaataaagtaaaattaggactagtatgtgaagaggggtgctaacagtgggaaaacttgatgaaacaatgttctttgactttggcgataataagcaaaacgatgtcagagaaactttaaaaacagtctacgatgctcttgaagagaagggatataaccctattgatcagatcgttggttatttaatttcaggtgatccggcatacattccacggttgaatgatgctcgtaatttgattcggaaacatcagcgcgatgagattatcgaagaactcgttcgatactatctatctgaacaaatcgctgatagcaaaaaggaagaaaattaatgagattaatgggaatggatgtcggttcaagaacagtcggaatttcagttagcgatcagttaggatggactgctcaaggtgtcgagattgttccaatcaatgaagatgaagaaatcttcgggattgaacgcgttaaagaattagtaaaagaatatgatgttgtaggtttcgtattaggcttgcctaaaaatatgaataacactgagggaccaagagttgaagcagcacgtaactatggtaagttattggaagaaacttttggattacccatcgattttcaagatgaacggctaacgactgtggaagctgagcgcatgttgattgagcaagcagatacttctcgttcaaagcgaaaaaaagtgattgataaattagcagctagcctgattttagaaaactacttaaacggacatggaaaattaatcgatagattaaagtgaggacaagcatatggataacgaagaacaaaaaattacacttgttgacgaacacggaaatgaagaattgtataacgtactatttacgtttgattcagaggactatggtcgttcatacgtcttactttacccatcagaagcagaagcagatgaagaggttgatattcaagcttatgcctttatgcctgatgaaaatcacgacttaggtgaaggggaattgattccaattgaatctgatgaagaatgggatatggtcgaagaagtcttgaatacattccttggtgatcaagaccaagattaatttcctagaaacggtccttgtttgacgatgagatattatctatcggcgagcgggccgtttttgatttgaaatgaaatgagattgatatgaataagaaaattttagatgttttagagtatgacaagattaaacaatctattcggcagtttatagctactgaaaatggaacaaaagagttacgtgagctagtaccaagtagcgatgaaactgaagtacgaaacgccttaaaacaaacactagatgcggttaatatttatcgtttaaagaatggtattccagttccgcggcttgaagatgtgacagaagcacttcaacgtttgaagattgatgctgctttaaacggtcaagaattagctcaaattggtagaatcctaagagctacacgaacggtaattaactttttcgatgatttagaaagtgaagaaattgaaatcgttgcactagatcaagtgattgagcaactagtaactattcctgaagttgaagaacgtttaagtaattcaattgaaggaaacggtcatttgttgaattccgcttcaagcgaactaagacggattcgtgcctccattactcgtatcgagagtgatgtgcgctcacgaatggaaaaattcacacgtggaaataatgttaagtatttaagtgaaccaatcgtgactatccgaaacgaacgctatgttattccagttcgtgttgaatatcgttctaaatttggtggagtagtccatgatcaaagttcatcaggacaaacattatacgttgaacctgaatcagtagtggatttgaataatgaattacgacaaaaccaagtagcagaagtccatgaagagcaacgcatcttacaagaacttagtgcattagtagctccttacacagatacattaaaagataatagtcgcattttgggccatttagatttactaaatgctaaggcccagtacgctcatcaactaaaagcaactgaaccgcaaatttcagcgtccgatgaaattaacctacgagaagcaaggcatcctttgattgaccaaaaaaaggtagtttccaacgatattagactaggtggagagtatgagacactcgtgattactggacctaataccggtggtaagaccatcaccttaaaaacggtgggactccttcaattaatggcacagtcgggaatgtttattccagctaatgagaatagtacggttcggatttttgaggaaatatttgctgatattggggatgagcaatccatcgaacaaaatttgagtacgttctcttcccatatggataatacaattcgaattttaggcaatttaaatgaacgttccttggcattatttgatgaattgggtgccggaacagatcctaaagaaggggctgcacttgcgattgctattttagataaagttcgcagcacgggggctgtttcaatgactaccacccattatccagaattaaagacttatggatatgaaagaatgggtaccattaatgctagtatggaatttgatgttgataccttgcagcctacctataagttattattgggaattcctggtcagagtaacgcttttgaaatttcaaaacgtttaggtttagatagtgatatcatcagtcaagcttgggggctagttgaccaagatagccaagatttgaacaatatgattaaagatttaacgactcgtcaaaaacgagctcaaaaaattaatcaacaagctgtggaattacttaaacgagccgaggagtaccaccaaaccttggtcaagggagtcgatagcctaaattcgcaacggagcaatttaattgagagtgctaaagaagatgcaaaccgaattgtgaatgatagtcaggccgaagcagaccgcattattaaacgtctacgtaagttagaacattccacaggaagttttaaggaaaatgatttaatcgacgctaaaagtaaaattaacgcccttcatcaggatactaaccttaaacgtaataaagttttacgacgcgctaaagaagctcaaaaattccatgaaaatgatgaagtagtggtcttaacttatggacaacgtggggaacttcttcggcaagttgataaaaaacattgggaagtccaaatgggaattatgaaaatgaaggttgccgttgatgaactggaaaaagttaaaccggataagacggtcaagcgacgagttcataactcagttcaaagaacggcttctgcgggagttaaaacaaccttagatttacgtggaaaacgttatgaagaagcactgactgaaaccgatcgctacattgatgctgctttgttagcaggttatgacgaggtaacgattgttcacggaaaaggaactggggcacttagaagtgggattaccaagtatcttaagaataatcgtcgaattaaagcttttgaatacgcacctgcgaatgctggtggaaatggtgccacgattgttcattttaaataatccttataaaatgtaagctaattatttcatttgctacgcaaagactggtatagttaacgtaacaaattgtgaaagagggtaattagaatggttgaagctattacagatgcaaattttgaagaaaaaacaaatactggcgtaacactaactgatttttgggctacatggtgtggaccttgtcggatgcaatcacctgtagttgaacaacttgctgatgaaatgggcgataaagtttcattttctaagatggatgttgatcaaaaccctgaaacagcaagaaactttggaattatgagtatcccaacactcttggtaaaaaaagacggagcagtcgttgattcaatcgtgggataccattctaaagaacaattagctaagattttagaccaatacatttaattaaattgaggctaagtagaaaccaatttatcaataattggtttctttttttatagagttaggtgggtaacatgctccctttttttactgaaatttagtattatgggtgtatgtataattttatttagtgggggaattaaaatggataatcggccaattggttttatggattcaggcgtcggtggtctgacagttgtcaaaacagctcaaaaactgttacctaatgaagaaattatctttattggagatgaagcaagaatgccgtatggtcctcgtcccacagcagaagtcgttgaattttcacgacagatggcgtcatttttaatgactaaaaatattaaggcgctagtgattgcatgtaatactgcgaccaacgcggcgttagcggttttacaagctgaattacccatcccagtaattggggtgattttacctggcgcaattgcagctaataggcaaactaaaaatcaaaaaattggggttattgctacactaggcacaattaaatctgaggcttacccaaaggctttagctgaaattaataccaaattacgtgcttatccggtagcatgccaagaatttgtagaaattgctgaaaaaaatgaacttcatacaacggcagctcaaaaagttatgaatgaaaaactagctgagtttaggcaagatcaaattgatactttgattttaggctgcactcattttccgcttttagaagaaggtatccaagcagccgttgggcctgatgttactttagtagatccaggagtggagaccgttcaccaattaattgaaattttaacaaaacaagcgcttcaacatgcagaaggtcctaaagcgcaggatcaatattattcaacgggtaatattaagaattttgaagaaatagcgcggacattcttaaatcaagatctaagagttgaagaagttaaaattgactaggagaaattagaatgaataatgaaattttgattgccacgaaaaatgatggaaaattaaaagaatttaaacaaatttttgaacaaaagggaattgttgtaaaatcactgaaagatattaatgatgacgttgaaatagttgaaaatggcttgtcgtttgaaaaaaatgcccgtttaaaagcagacggatacgctaaatcaattggtattccagtccttgccgatgattcaggtttggaaatcgatgctttgaatggacgcccaggaattttttcggcgcgttacgccggtgatcacaatgatgcagctaacaatgccaaagttcttagcgaattgggtggcattccagatgaaaaacgtacagcaacgtttcattcaaccgtagttgtgcgcaaaccagatggaagtgagttagtggcaaatggaaatctacgaggacgaattcttgctgttccgcgcggtgacaacggctttggttatgatcctttattttttgtggaagcaaagaataaaactttagctgaaatgacgcgtgaagagaaaaataaaattagccatcgtgcattagcaattgaagatttattagtaaactttgataaattctgggaataaataaaaaagtatgccatcaacattgaacccgtagtagagtgaattagatctaactttgggtgattataagatggcatacttttttactaattttgaattttaatttgttcttgggctaaagttcgtagacaacgatccaaaatcatagttttcatcggagtttgatagccggccttaaccttggcagagatttgaactcccagatatccgtaagtcttttcgactacaggagcgagaacaatgggagtagctttaattttatcggtgtcttgtttaatcgaagctagttggtcacgcaacaagtctttagcacggtcaatttcaaacggatcactgattcgtagaaagatggaaatagtttgacttccgcgagaatgatttgaaattgttgaaatggagcgattcggcaggtaatgtaaagtaccatcgagtgcttgaagttcaatggttcgtaaaccgattgaaacgacggttccatcgatggattgaatcgtaacactatcaccaacacgtagttggccttcaattaaaatagttaggccgttaataacatcggacacaatcccttgagtcccgagtccaatcgcaacacttaagattccagcaccggccaataaagtgcccactggtactcctaaatttgataaaatagtatagacgtaaaagaataggacggaatacttgaaaatatttttaaccactgcgtaaacggtttgtgaacgagcggattgtttttcaattggatcgtgatgttgaaaactattacggatgatatgtttaccaatccgattaataatccagaaaataatggtgattagaacgagttggaaaaaatgttccataaaagctacaccaattttttcccaatcaatatgagtaaagctggattttaatgatgggaagcctgctgcaatagtaagcatgtttttcataaataaaaatcgtcctttcagtaataatactattctaacagaattttgtagcgaataagtaggggttttaattgcacttaattatttgtaatgctattctgtagtcataaacgaacaggaggggatcatttgacaggaggcggaattgctgcaattattgctgcagtagcattgcttattttagttctattcattggattagtattagtgaatgcttctaaaacattatcagagattaatcgtagtatggcagtgatcacacgggatgttgatcttatatcacatgaagctgaaggtattatggcaaatgcgaacgaacttttagaagatgttaacggaaaagtcgctaccatcgatccattgttccaagcggttgctgacttgagtgaaagtacatcggatttaaaccaagcaactcgtcgtttagctggtcgggtaaaccatactggaaaaagcaagaataccggtaaagtagccacagccatgaatgttggtaaaggtgctatgaatatgtataagaaccataaagttaagaataaatagggggctatcagtatgtcaaagagtagttttttactaggtgtaatcttgggtggagcagctgctactgcagcagcaattaagttaacagatacaacacctcaacaacttaaggaagctgctattgagaaatttgatgatttcatggaatctaatgactttgatacagctacgcttaaagatcgagcagtttcatctgtagatgatttaaaacaacgaggaatggaattagctaatcgtgctaacaataaatttaatcctgatttagaagagatggatgaagatttagttattgataacatggcagaagcgactccatatgaaaaacccactgaggtatttatgcctcacaaaatccaagaataaataaaaaaagatggaaactagtagctattgctagttttcatcttttttattttgaaatggtgatgattttactcggtaagcatatttattgatttttacttataaaagataaataatcagatatgaaaaacgaaaacgttttcaaaaagctgaggaggaaattattcatggcagaaaaaattcaagcaggaatagcaatgttaaaagtaattgaatcatggggtgtagaccatatttacggttaccctgggggatcaattaattcaactatggattctttgcaaaaagaacaagacaatattaaatacatccaagttcgacatgaacaagtcggggcacttgcagcagcagctgacgccaaattgactggtaaaattggggtagcttttgggtcagcaggacccggcgcggtcaacctacttaatggattgtatgatgcaaaggaagaccatgttcctgttttggcaattgtaggacaagtcccacatacccgaatgaattatgattacttccaagaattcaatgaatctcctatgttcgatgacgttgcggtttacaatcgaattgtgatgaccccagaaagtttgccatatgtaattgataaagcgattcgtatggcatataaagaaaagggagtagcggtagttattattccgaatgactttggctacgtagaaatcccaactggtaattattctactgaaaaaacacgtaatcaacctgagattaaacctcaacctgattctgaattagtgcaagatgcttgggatatgattaaaaatgctaaatatccagttattcatttaggacaaggtgctcgcggagccaccaaagaagttgaggcattatctgaaaaacttcaaattccaatcgtaattactgggttagctaagggcgtaatccctgatgaatatgaggggaatatggggccatttaaccgagcggcttctaaggtttctaatgaattaattaagaaaacggaccttttaatttcaattggtgctaacttcccatttgcagcaattgtatatggagatcgaccatttaagtatattcaagttgataatgatcaagctatttttgggcgccatcattcacttgatttaggaatttgggcagatgctaaattattcgttgaaaaattggatgaaattagcgaagccgttcaaccgcgtccattctacaaagcagctgtggctgcccaaaaagactggcgtaaatacctaaagggcttgatgcatcggacagatggacctctagaatacgaacaagtttatcaacaaattaaccgaattgcagatgacgacgccgtattttcaatggatgttggggataatattattaatagtttccgtttccttgatatgaatcctaaacaaaaaatcttaacttcagctttgtttgcaactatgggttgtggaattcctggagcaatggctagcaagttaagctatccagatcgtcaagtattcaatattgctggagatggagcgttctcaatggtaatgcaggatatgattaccgaaaaacgttataacttaccaatcattaacatcgttacatctaaccgccatctaagttttattaagtctgaacaagatgacgttcctcaagatgaattcggggtagatttaactgatgctgactatgctaaaattgctgaaggaatgggtgttaaaggaattcgagtcgatgaaattagtcagctcgaaaaagcctttgatgatgctgttacagaagtaaaagctggacgtccggtgttaattgatgccaatatcacggataaacgaggaattccagttgaacttgatttggaacaggacgatacattgtatacacctgaatttcttaaagaatgggatgcagaagaattgaagccatttgatgaatatttagctcaatattctgccgaataattaggctatataaaaagcgcttcggcttagaaccgaagtgctttttgatagaaatattatagatatctaagttcttttgaagtatgggtaaatggtaggcaaccatccttagtgatgtgaacacagtcttcaatgcgaacaccagcaacgccggggatatagataccaggttcgattgagaaacacataccttcttggaggattaaatcgtttccttccatgatggatgggaattcgtgttctcccatacccattccatgtcctaggcgatgaatgaagtattcaccataaccggccttatcgatgatgtcacgtgcgactttatctaaactagcagcagtaattccaggtttggcgtaagcttgggcagttaattgagcttctagacaaactttgtaaatatctttttgtttgtcatttaaagttcctaaagcgaccgttctagaagcatcactaatataaccatcatggatggtacctaagtcgaaaagtactaattcattattttgaatttggttcatgccagttgcaccatggggttcagcagcatgagcgcccacttgaataagagtatcaaaactcatttccattacaccacgcttttttaaagcatattcaagttcagcagcaacatcagcttcagttttaccagcggcaactgcattgaaaccaacttcaaaggcgtaatcagcctctgcaccagcagcatttaatttttcgatttcgtcggcagttttaatcatacgaaatttttcaaaaactggagttaagttttgttcaaatttagcatttggaaattcagaacgaagtacttcataacgatcaaatgtaagattattattttcaattccccagtgaatagggttagcattgcgttcacgaatatatttagcaattaattgaaagggcttctcgtgatctaaataaccataaacggggtgattccatccagtatctttaattgcttcaacttctagtgcaggagcaaataagaatggttcatgatcaggaaaaacaaataaagctaaaacgcgttcgatagggtcgctaccaaaaccagttaagtatttaatactttcaaaattactaatatatgcaacgtctaacttatgatctgaaacccatgcttggactttatctaattgtgacatttaatctcttctttcttatattcggatagttagattatagcacatagggaaataggtaataaaataaaaaaaggttgcaagtatgctgaaaatttgataacgtattcatggcaatgaaaacagaatgaaaacaaataatatcaatggaagaggtaatataatatggcaaaacaaaccatcacaatttacgatgttgctcgagaagcgggcgtttcaatggccacagtatcacgcgttgttaatggaaatcctaatgttaaacctgttacaagaaaaaaggttaacgaagtaatcgaacgtttggattaccatcccaatgcagtagctcgtggtcttgctagcaagagatcaactactattggagtaattctaccagatattactcaaatgttttttgcatcgttagcacgaggaattgatgatattgcttcaatgtacaaatacaatatcattttagaaaattctgacgaagatgttgataaaaaggttgaagtgcttgaaaacttacaagctaagcaagtagacggtatcatttatatggggaatgccgttgacgatcgtttacgagaagcgtttaaagcagctcgtacaccagtcgtttttgctggttccgtagatgataagaacactttgccttctgtaagtatcgataataaggctgcagtatacgaagcagtcaataaactaattgataataaaaataagaagattgcttttatctcaggtccgctttctgaacccgttaatggtaaatttagattagaaggttatcgtcttgctttaagtgaagctaaagttgattatgacgaaaatctagtttttgaaacaagtaatacttacgaagatggagttaagttagcatccgaaattgcttctacaacgggcgttacggccgcttttgttgctaatgatagtttagcggtgggcttacttaacggccttcaagatctcggcgttaaagttccggaagatttcgaaattatttcaagtaataatactagcttgactaagatggttcgtccacaaattagttcaattggtcacccaatgtacgatactggggcggttgcaatgcgtcttttaactaaattaatgaataaagaagaagtcgaagaacgtaatattactcttccatttgatatggtcttcagacaatctactaaataaaagaaaaaatccacttctacattaggtagaagtggattttttgtttaattatatgttataggaaaagtcctttatacaaagcaacggcacaaataccagctaagattggggcaacaacgggaactgatgcgtaaccccattgagatgatcctttatgtttgattgggagcattgcgtgaactaaacggggacctaagtcacgagcaggattcaaagctggaccagtagcaccaccaagtgaagcaaccaaagtaccaactagaaaaccaagtgcaataaatactgatcctttattagcctcgaaataaggagcatgagtaaaggctgtagccccaaagaagaggacgaatgaaccaataaattcgttagcaaaaccattccaagagctatgactagcatcaattgtactaaacgtacctaaaattgattcagtattagtagttaaatcataatgaggcttgtaagcaaaataaactactaattgtccaaaaatagcacctaacatttgggcaataatgaaaggaaggacctgagaccatgagaacattcctgaaactgctaaaccaatggtgaaagcaggattaatttgagctccagaaatagttccaaacattaatgcagggaccattacaccacatccgtacccaactgcgatgactaaccaatcactaccgttaccttttgtacctttaagctcaacgttagcaaccgaaccattacctaaaagaactaaaattgctgtaccaagaaattcagctgctaacttggcaaaaaaactatattccatattatgtaaaactccttaaaaataaaatttacgtaaaacacgctgtttatgagtatatcttatttgaaaggcaatatgcaaagctttcttaacatttctcaaaaaataagaaaattggatgaaaacaagtatagcaagtcttaagatatcttgaagagtaatgagagattacggaatagtggtaaaatgaagatatattatgagcttaatggaggagtggtcccaatcgaagaaacaaggatgacaagagaaacgcttcaagaaaaaaatccgacaattgacagaaaaccaaggctgttttggataagagtattgatgattatttgtgggttattactatttttaactttctcagctaaacaaaccgtctttaatgtaaactatgttcaaagtcaggtggttaaatcgaatgcggctagtacaattaatcagcaagttaatacacaattgcaacaagcagggattcaacagactaatttgatccctgataatgtaattaatgatgaattgaagtcaatgattggtgaattttatgctggtgaggaagtcaagttagatcaatcaatcattacggaagaagttaatgcaaatattggcacgtccggaatgatacaacaagggatagtttcgattattgttaatcaagttgctaatatttttaatagccagttggatacgcaaaaactaacgcattatgcgggacaggtagctaaattacaaaagttgaatcaaatcatgatggcgattagtgcagtaggactgctgatactaacattctttgctttcattaaacgacgcggtctcaatttattaggttccatgatggtgacggttggggcatttgctactgtgattagtgccatcgcctatgtatcaaatgttcttaatgatttgccaatccaatatgctgtaattaaagggattgttgagcaagcaggacaagatattttattacgtgagttaactatggcacttggtattttaatattaggaatcattttattggtgttgtcttttggggctaatcaggtcaataaaaaaagaagtaaaaatcgttaatgatttttacttctttttttattttagtctgaccacatatcatttaagacgatggtttgttcacgatcagggccgattgaaaaggtgctaactggaactccagtaatttcttcaatctttttaagataatttttagcattagctggtaattcttcgtaagtagtcatttgagtaagatcttcatcccaacctggaagagtttcataaattggagttgaatttttaagttctttttctgaagcaggataatacttaatcacgccgtgatcagtttgataaccagtacagattttaagttctttaaatcctgaaaggacatccaaacagttaacaactaaatcagttagcccattaacttctgaaacgtatttcattaatacgccatcaaaccatccaattcgacgaggtcgtttagtaacggtaccatattcatgagcaatttcacggattcgatcaccgacttcgttgatttgttcagttgggaatgggccttcaccaacgcgagaaacgtaagatttacatacaccaatgacgtgtttaatcttagttacaccaattcctgcacccgtagcagctccaccggcagttggattagaggaagtaacaaaaggataagtaccatggtcaatatcaagcatagtaccttgagctccttcaaataagacgcgtttattatcatttaagttagtgtgaattaggtagcttgtatcagtaatatagtccttaagaatttctccatattcaatgtactgagctgtcaattcctttaagcttggaagttgattccaaagatcttcgtctagaatgcgtttcttttgttcaagattaaaagcaattttttcttcaagagtttcgttgtctaatagatcaatagctcggataccaatacgttgcatcttgtccatgtatgctgggccgatacctttattagttgttccaattttttcgccatttttagaacgatcacgttcttgttgttgatcttgtaagatgtgatatgggaaaacgatatgagcacgatcagaaatttttaaatgatcagtgttaacacctactccatttaattctttaatttcatcaagtagggtagcaggattaatcactgttccattaccaatgatacaaattgaattaggagcaagaattccggaagggattaaacgaagagctaatttttggtcgttaaccacaagtgagtgaccagcattatctccacctgaataacgcactgtaacatcagcactttgtccaagaaaatcaataatctttccttttccttcatcgccccattggcttcctattactactgtagctgtcatatttattcctccatttttatcaatacacaactctaaagatgataacacagtttaccaaaaaaataaaagtgataaaccgaattatacaaaaggtaattcttttaatggttcgtgtttattaatgctgaagattttggtaaaatggagaggtaaatatttttaattcaaaggagtaatcaaatgattgatcgttatgcaagacccgaaatgcaaaaaatttggaaccgccagtcccaatttcaaagttggcttgacgttgaaatagccgttgttaaagcttggaataaggatggaaaggttcctgatcaagatctcgaactaatcgaaaagaaagctaagtttgatttagatcgaattgatgagcttgaaagtcaaacgcatcacgatgtaattgcctttactaggtccgtttccgaatctttaggcgaagagcgaaaatggattcattacggattaaccagtacagacgttgtcgatacagcgcagtcgcttcgactcaaagctgctaatgaaattatttcggcagatttagaaacactaaaaacaaccttgaaagaactatcaatcaaatataaagatttaattgccgttggacggactcatggaattcatgccgaaccaactacaattggattaaaatttttacgctggtattcagaaattaatcgtaatattgaacgttttaatcatgcccgtaaaaacatcgaagttggcaagattagtggggcagtggggacttttgctaacattactcctcaaattgaagaatgggtttgccaaatgcttggaattgggcatcaagaaatttcgactcaaatcctcccacgtgatttacacgcagaatatttgagtgttttggccttaatcgcctcccaaattgaagaaattgcaactgaaattagacatttacagcgtacagaagtcaatgaaatgcgagaaggatttgctaaaggacaaaaaggttcatcagcgatgcctcataaacgtaatcctattggttctgaaaatgtttcaggactaagtcgagttgttcgtggagaaatgatgacagcgtttgaaaatatgaatttatggcatgaacgagacatttctcattcgtctgctgaacgtgtaattttaccagattcaacagctttagttgactacattcttacacgaatgaatcggattttaaataacttggtagttaatgaagatgaagttcaaaaagaccttgaaatgactcatggattgattttttctcaacaagttatgttgaaattgattgataaaggttggacccgcgaggaagcctacgatacagttcagccaattgctatgatggtatggaatactgggcaacattttatggatttactacttgaaaatgataaaattaagtcaattcttgatgatgaagaaattcgagctatttttaactatcaataccatcttaaaaacgttgatgcaatctaccaacggtgtggtatcgaagcataatttagattaaaagggatgaggaattttgatgaaaaaatcaaatgaagcgttacttgtaattgattatacgaatgattttgtggcatcgaatggtgcgttaactacaggagtagttggacaaaagattgaatcagagattatcaagttggcgaaccaagagctacgtgaagacggttgggtgtttttgccaactgatgtacatgtagaaggcgatccatatcatccagaaactaagttatttcctgcacacaatctcaaaggaacatggggacgtgatttttacgggcagttgcaggattggtacgatttaaataaagctaatcaacgagtgaaaatccttgataaaactcgttataatgcttttaccggaacggacctagatatgcaactaagagctcgtaaaattgatacagtacggctagtgggggtatgtacggatatttgtatccttcatactgccgttgatgcatataatttaggctatcgaattattattaatgaaaaaggtgtggcaacctttacagaacatggtcaagaatgggcactagaacattttaagaatgcactaggtgctcaggtcgaataggattaatataaatgggaaccgctgagaaaattattttttcaggggttcctttttatgtggtagtcaaaaatcagcctaatttatgatagaatgaagtattaagtcgaattaaagcggagttaataatgaactttacgttaaaaataattagtagtattttttcaatcccacctaactagtctgggaattgaaaaatcaaaaattatagaaattattaaataaaaggggattttaaatatggtagaagcaattaatttaaaagcaggcatgacgttcattaaggatggtaaattgattaaggttgtagaaactaaccatcataaacctggtaaaggtaacacagtgatgcaaatgaagttatatgatgtacgagcaggttcaactgttcaaacaactatgcgtccaactgaaaaagttgaacaagctattcttgatactaaagaagctcaatatctttatcgtcaagatgatatggctgttttcatggatactgaaacatacgaacaatatgaattaccagtatcaagtattgaaagtgaattaaaatatcttttggaaaatacaatggttaaaattagtttttatggtaatgaagtaatcggggttgatttaccaacaacggttgaattaaaagttgttgaaaccgcaccatcaattaaaggagctacagttactggttcaggtaaaccagctacaatggaaactggattagtagttaatgttccagactttatccaagaaggcgaagttctagtaattaatactgaaaaaggaacttacacaaaacgcgcataattgtctaaaaggattgatagtaggaatactattaatcctttttttgtcggcttttttgatagatgaatgattctcttggagcctaactgtaaaaaggaataatagatattttacccgatttagaaataagcatcgcatatcatcagcgggtatgttaggataaatttgtagttagcaaaaactacgtttaagggcagttataaaatgattttacaatcaagaaaacgagcactaagtggcgaagctagaatataaaatacttattgaccccccaaatcaatgagtctaactcaaaagctagcaatagctcaataatattacattgtcccaaaacttaatatattctactatcttttaatcgggatagtcgccccctcgttaataagaaacgtttctatttttaagaagcgttttttatttttttcttgtcaaaaggaacatacgttcgtataattgagagtggaggcagatttaatgaattatgataaagaacccaagggtgtttttttaatgattgataataaatctttttatgccagcgttgaagcagttatgcgcgggctaaatccattaaaagttgttatggtagtaatttctgagcaggaaaataccaatggtggactaattttagccacatcaccgatggccaaaaaactttttggattgaaagctaacgtctcgcgacaaagggatttaccgtgtgatccaagaattataatggtcccaccacgaatgaatttatatattaaacgtaatcttcaaattaacgaaatatttaaacagtatgtggcagaagaagatttatatccatattccattgatgaatcaattttagatattactaaaacctggaaactttttggagaaactcctgaagaagttgctaaaaaaattcaacataaagtacgtaggcagttaggcttatacacaacaatcggtgtcggtgaaaatccattgcaagctaaactagcattggataatttcgctaaaaaatccaatgatttgattggcacaattacatacaatacagtagcccaaaaagtatggatgattcctaagttgacagatgtgtggggaattggaagacggacgaccgagcgtttgcaaaaactgggtattaacaatatgaatgagttagcacatagtaatccatattttttaaaacaagagtttggaataattggaactcaattgtttgcaacagcgtggggcattgatcgaacgattctaagtgaaagggtaaaacctaaagaaaatagtgtgggtaattctcaagtgttacctagaaattatcagcagcaatgtgaaattgaaactgtaattaaagagattagtgagcaggtagctgcacggttacgacatcggtgtcaacaatgtggtgagctaacgttaagtattggatttagttaccagtctacgataaatagtgggtttagccagtcattgaaggttattccgactaatagtaatgtagaaatttttaaatatgctaaggagattttccaaaagtactggaaagggcaacctgttcgtaatatagctatctttactgctaaattgagctatcagattggtgaacaattgaatctattcgaaccgtttccgaggatttccgaacatcaaactgatcaactggttgaccagattagagcggaatatggctttaccgctttagtttacgcacgtagcttaactaaaggtggtactgcaatccagcgggccagcctagtaggtggacataatggagggaatgcttatgaataagcaacaagaattaactttaattaatcagcgaattgaaacactgtttaatgtttcaaaatttaacactcaattttggattgtaattgttaatgatatctatgatcattcttataatattttttttagtgaacaacgacgagggcaaagggaacgttctattccaattcatacgcttgaaaaatatacattaatagatctagaagagattgtacgcgggcttcagcaacgctggaagtttactataaaatttattcaatttgaaaatcaactttggcctactagtcaaaaagttattcaaaaaaagaggcgtagagatgaataacaaaaataatcaatatgatcctcaagtagttcaaaacttttttgataatgtgtatattgatcgaggaatgataaagtggcaaggcttttttctttcagatcatactgtagcaattaaacgtaagagaaatgataacaaaatattttatgagcaaaaaattccacccagaatgaaacaaggtgaaatcagattaaaagttgctcgggcatatgaagagcaactattagttgaaattcaattaaatgaatgtaaccgtgatttactctttgaaaatgcaataaaatcgcgtattaaaggatttaatgaagattctgtatatttaggtgatggaaagtttgttagcatttcgatgatgcgttcgattaggttagcgaacaatggaaaagggtaaggtgaggattgaatgtaagcattgacaaaccccactataatacgtaatatattaaacgtctatgaacagataaaaaattgaaatgaaagaaggagttcgggtatgtcaggacattcaaagtggcataatattcaaggtcgtaaaaacgcccaagatgcaaagcgtggtaaaattttccaacgaatctctcgtgagatttatgttgcagttaaagctgggggtccggacccttcttctaaccctcaattacgtttaatgatggataaggcacgcgcagcaaacatgccaaaagacaacatcaaacgtgccgttgataagggtagtggcgcaggtggtgctaactacgaagaaattacttatgaaggatatggaccagctggtacagctattatcgtgtcagctcttacagataacaagaatcgtactgcagctgctgttcgttcagcattcactcaccatggtggttcactaggggcttcaggttcagtttcttacatgtttgatcgtaagggttacattgttattagtcgtgaagaccttgataaaaatgaagatgatatgatggaagatgcaattgatgcaggtgcagacgatgtacaaacatcagaagaggtatttgaaatctatactgatcctaaggaatttgctgctgttcgtgatgctcttgaagcaaagggatacacattggctaatgctgaattaaccatgattcctgaaaacgaaacaatggttccagaagataaagttaaacaatatacaggtttaattgatgaacttgaagataatgatgatgtttcagaagtttatgaagcagctacattacctgaagacgctgaataataattattaaaggcaaggacaattaagttcttgctttttttatttaatcaagaatttaaaaatttagtatgataaaatttacttatataacatataactgaggtggcgtaatgagtaataaagtggtcgttcttggcagtctaaatgtggatacaattttacaagttggacggtttccagaaccaggggaaacattggctttaaaagataagcaaatggccggtggtggaaaaggagccaatcaagcaattgcagcggctcgttcaggtgcagaaactagttttattggtaaagtcggaaccgatgcgaatgggcaatttatgcttaaacaattacttgatagcggggtttcaacggaatatgtggcaacctccaaagtagcggatacaggtcaagcttttgtaatgctcgaaaataccggtgaaaatcgaattttaatttatggaggctctaatgctgagttaaatgaggatgatgtcaataaggcagctgaaaaaattcaacaagctgattttatcgttgctcaattggaaactccacttgaaacaactaaatatgccttcgaaattgctaaacaagctggaatcaaaacaattttaaatcctgctcctgcagttaaaaatttacctaaggaattaattcaattgacggatgttatcacacccaatgaaactgaagctgaaattttaacaggcgttacggttgtggacgatgcttcaatgaaagaagcagcacaaagattacataaaatgggagtccagacggtcattattaccctaggtagtaaaggggtttattatgacgatggcgatgtgagcggcattgctccggcgtttaaagtgcatgcgattgatacaacagcagctggagatacgttcctaggatcttttagttcggaattgaagccagatttaagtaacttaaaagaagccattatgtatggcaataaagcttcctcgctggctgttcagaagatgggtgcccaaccatcaattccaacacgcaaagaagttctaaaataaatagtcataacaaaaaaacatgaaccattcaggttcatgtttttttgttgtctaaatttaactaattaaaaaataaatgttctgtttttgagtatatatacggtgaggaggacgtgagatgaatataaccagtaagctaaatcaaatcatccaagagtgtcttgtcaatcgggatagtgatttattcattatgccgcgatttgataaatatcaattattatatcgagatgcgggagggtaccgaaagtctacccagattgatagagatgaagcagaacaaattatgatgtatatcaaatatcgggctgatatggggatcagtgagcgacgaaggccacaaagtggggcgatgacttggttaaaccgccagggagaattagttaatttacgaatatctacggtgggcgattttttggatcgaccttcgatggtaattcgttttatatatgtactaaagcaagatgaacatattttagatagcgaaagtatggaaaaaatccaactagcaactaagcttcggggattaatggttttttcaggtccaatgggctccggaaaaacaacgttgatttacgaagtagcccgtaaattaagtgaaaccaagatggtaatgtcaattgaagatccggtagaaattcgtgaacataattttttgcaactgcaagttaatgaaaaatcggggatgtcttatcaagaattactgaaaaatggtttaaggaatcgaccagatgtttttattattggcgaaatccgagatggtaaaactgcagaaattgcgattcaagctgcattaagtggtcatttagttttaaccaccgttcactctaaaagtacccgaggggtatggaatcgaattgttgaattaggtgtacgagaagagcacttaaaagaagccttaacggcagttatctatcaaagaatgatttctgctaaggttggtgatttaaaaattatggcagaaattaaatcattccatccggccctgaaaggaacaaagaagaagtggacagaacgactagaggagtggaaggaaagtggccaaattactaaagaagtatttgaagatttccaatacggatagaatccaattaaatgatcaagcgtttattttttcaactatggttgatttaatgaaaatgggtgtttcgattcgcaagagtgtggaatttgttcgaattatgcgtccagcgattgctaaacccatggaaaaggtgattaaccagttgcagcgtggtaaatcattttcaacagcttttggtccgtatgtaagtactaatatctactatcaattagaaattgccgatcaacacggcggattagagcaaaccttagaaaccatcgctaaaatttttactagtcaaagtcagcaacgtaagaagttaaagtcgttaattcaatatcccgtttttttaatggcattcttgggaataatgatgctagggatgcgaatttatattatgcctgaactggataattggaatacggggacagcaagtattcaaagtcaagtgattaaattggtaataattggtatgttatttggaattgtagtaggaatattatatttatggctaaaatttaaaaagaaaagtatggctaatcaagtcgctttactatgtagaataccaatctttggccagttgtatcaaacatattgtcattactacttaaccgcaaatttatcattttttattagtagcggtatgtcgatgggaagtgtttgtaagtatttaacccttttagattcccagtctttacttcatcaaattggccgacgggtcgaaaaaagtatggctagtggtcaagatattagttcggtaataaagaaatcggtttatttgccaattgagctagacttattgctgcgtaaagggagtaaaaaagaaacattatcaaaagaagtgcatgcattatcaatgattaaatacaaaactttgattcaaaaaattgaatgaatgattttaattgtccagccaatcttgtttggcataatcggaattgtcattgttttgatgtacatgagtcttttaatgccaatgtataattcaatgaaggaagtgtcaaaatgaaagcgaaaataaaaaaaggttttactttgattgaaatgaccatcgtcttatttattatctcattattaattttaattattctacccaatgtcactagtcaaaagaaaaatgctagacatattcaaggagatgcgatgacacaagtggttcaaactcaagtagatttgtacgaaaatgaatacaacgagttgcctaagtccttagatgaattacaggacaaaggttacttatctgataaacaagttcaataggctaatcgaaatggcattaagattaatgatggacatgcagtcggaagctaaagttagctgttatttgaaaaaagcattttcactattagagacgatgatcgttctcttaataacaagtggaacgatcttaatgggttatgggggttttaaaggagctcagagcgccaataatgaaaaaatattttttagaagatttgaaatgagttggaaggatacacaacgtctaacagcttatgacggatacaaagctacggtaacttttcagaagaatttccatgaggtaatttttttatgttatcggaatggtcataaaatttcaaaacatctggagttacctaaaggattggagccggtttacgatcgaaccattaacattggtaaaaatggaacggtcacaccaatcaatgtgatgctagaatccaatggaaaaattaaatataagttatcagcacaaatgggttggggagtttatgaaatcaccgaaaaataaacaaggaacactgttatacgaaggaatcgttagtttatttttattaggaggctttggcacagttacattgaattcatggcatatgtggaacgataaaataaatagagaacagattgaactaagttatgagcggacaatattaaatgaaatcagacaaaagttataaaaagagtggttttacattaatggaagctgtattagcaatgatgataatgtttttaattgttaatttagcagtacttttaattaaaagtgctcaaaataaggctcaacaaaattttaatatgaagattacagaggtagtccaagacttggagtcaccaaagcatgcttttgaattggttgaagttagaagtgaccaattaactctatattccaaaactgaagagaaacgttattatctaggaagttatgtcaatcatgatatgttgagatatacacctggacatatgccactagttttgggtgtgcaacacgtattttttaaaaaagaaagaaatttaatccaaattaaattagtttcaaatggaaagaagagtatctcatatgtatatatcccgcctcaaaaaaagcggtagtgcaatgattacggcgttatttgttttatcttttttatctggaattagtctcttgattggtgagcaagcgcggcaagtaatactgaggttaaaagatgaacaacaaataaccaagactaagattctagcaaataagtttgtgttagagaatagaaaacaaaaaataaggtttttagatgatccgaaatatggaactgttaaaataaatgatgataataacttgactataaaagtcctaaaaggtaatactgtaaaggttgaatttaatgaaagtggctattagtgaagaggagtttataaatgaatacagaaactattgaaaagatttataaaacattcgagaaatcaattgaaattttaaaagaggaattggacgttgattttctagatgcatttattgaaacaggtgacaatctaatttctggtcaaattcatgttgaagacgggaagcctagcgaagcaattattggcgaattaaaaaaaatatatgaaggttttaagtacaatgattatagcccggaagaattacgaaaaactatccaattggttatgattcgtgctaacaaagaagaacgaattcaagtaaatcatcaatttacaccggaagcaattggaatgctttttaactacattattgaaaatttaaaagttgattcaaatcaattaacaatttttgatcccgctgtaggtacaggtaatctactatcaacaattttaaattattttcaaactaaacgaattaattttaaaggaattggtgtagataatgatgatacgatgctttcgattgctagcatgtcatttgcttttgaaagactagaggtggagctcttccatcaagacagtattgatgatttatttgtaaagaatgttgatattgcggtatctgatttgccagttggctattatcctattgacgaacggactaagggctttgaaacgagaagcaaggaaggacattcttttgtacaccatttattaattgagcaatcaatgaagactatccgaccgggagggtatggggttttcctagttccaagtaatttatttcaaactcaagaggctaaaaaattattatcatttttccacgaaaaagtttatttgcaagcaattttgaatctgcctaccaaaatgtttaaagatgaacaggcgcagaagtcaattctcattttgcaaaaggttggagctagtgctaaacaggcagaacaagttttattaggagaattcccagaattcaataatcaagaaaaaatgcttgatttcttacaagattttaagaaatgggctcaaaagaacttattttaggttttactaattaaaaagttttatgtatcattagactattaaaagtctaatgattttttaatttttgaaacatttctggggggaattgattatggaagaaaatggtaataatgagctggctcggaatttaaagagcaggcacgttcagttaattgcgattggaggaacgattggaacagggcttttccttggggcaggaagttctattcatttagcaggaccgtcaattctattagcatatattgtaactggattggtttgtttttggctcatgcgagcgttaggtgaactactgttatcagatttagaatcaacttcatttgtaacttttgtaactaaatatttaggaaaaaaagtaggattcgtcacgggatggacgtattgggtttgctggataacgattgcaatggctgagattacggcaaccggaatgtacgttaggtattggtttccaagtgtgccacaatggattccaggatttattatccttattttattaatcgggctaaacttgatcacggttgaggcttttggagagactgaattttggttttcaattattaaaattattgcaatagtggctttgattgccattggttttattatggtacttttacgctctaaaacaaacgtaggacatgccgaccttactaatttaatacattttggcggtatttttccgcaaggattgaaaggctttatcctttcttttcaaatggttttattcgcatttgttggtattgagatggtagggatgacagccgctgagactagagatcctaaaagtgtaattcctaaggctattaatgaaataccaatgcgaattggtatcttttatgttggcgcgctatttttcttaatggcaatctatccttggaatgaaattaatcccaatggaagcccttttgtacaagtctttaagaatatcggtatcccaggagcaggtggaatcattaactttgtggtcctaacggcagcggcttcagcatgtaatagttcactgttcacaactggacgaatgctattctcattaacctatggaagttcaaacaaactaggtaaacgactaggtaccttgtctaaaagtcaagtgcccaaaaatgcgattttgttatcatcgctagtgattgcagtagcagtcattttaaatatcttgatgccagaaggagtatttacactaatttctagtattgcgacaacctgtttcttgtttatctggggaacgattgtcttagctcatttgaaatacaaaaaaggtcaaaagcaggctaaaaaagaattcagtatgccatttttcccaattagtaattatattgtattaactttcctaagtttcgtgggcgttgtattattattgcaaaaggaaacggcgattgctttaattggatcattaatttggttcggtgtaatgtttacggtagcgaaaattaagggaaaaggggaactaacggattgaaatttttcacctcggatacacacttttttcataaagaattgttaaaagataaggactttgctccacgaaattttgacaatatcgaagatatgcatgcagcaatcattaaaaattggaataatcgagtgaccgatcgggatacagtgtatcacttaggggatgtggctttgaattttgtgagacctgaaaaaagggctaacgaacaaatattcagattattgaattctttgaatggtcacattgttttaattaaagggaaccatgacgcacgaagtttattcaaatatcttcaagctaataattatttgttaaatggacaatctaaatttcaatttcatgatgtgggtactatcattaagatgaatcatcgccaattaataatgagtcattatccgataatgttaggaattgtaaaacaggtaattaatttacatggtcatatccaccattacagcgtaaatattaaggaaaatattaatgtgggtgtggatactcctgaaaaagattatttagattatgcgattccatttggagcgccattttcagaatctgacatagaacaaatcatcaatggtaagaaaattgattttcaaaaaaggaagtaggcgttgacctttcttctttttttatttaggataagttttatattgatgagtggagaatttagatgagtaagaaaacaaatgaagaattatctgaaatgagaagaccggtcattaataaggttaaccgtgttagtgatgatgaaattctaatcaatgaccatgaatatcggctagaagtgaactatcgagaagcttttaatgaagagttacttgcagaacggtttgtaggattatttagtaggtatgattttttggtaggagatataggttcaggacagctaagattgaaggggttttatgctgatgatatgttagcacctagtgaaatgaagattagcagagttcaagattacctaaatgagtattgtggctttggctgcccatattttatcttacggaacatgcaaattaatgaacgtgctaaaaataagtggttgagagagcaaaagaaacttacccctagaaagaaaaatagtaagggacgtcaacctaaaaagactaaaaagagtcgtaaaccagtatcaaagagaaataacgaggttgtggggaccggtaagaagaaacgacaaaaaacatttacaatcagggagaagaaatagatgaagattaatagttacggcggatatttaattgatttagatggaaccatttatcggggaaaagaaaaaattcctgcagctaaacgctttattgaacgattgcaagaacataatattccattcctttttttaactaacaatacaaccaaaacaccagaagatgtggctaagaacttaagggacaatcatgatatcaaagcagaagcatccaatgtatacacggccgctttggctacggcagactatttggatggtatcgctgatcaaaaacatcgaaaagtttatattattggtgaattaggacttaagcgagctattttatcaaaaggttttgagatggacgaagataatcccgattatgttgttgctgggttagactatgatgttacatatcacaagtttgaaattgccacgttagcgattgaaaagggcgctaagtttattggtacgaatgctgataccaatttaccaaatgaacgaggattagtacctggtgcgggttctgtgattgctttattggaacgttctacgcaacaacaagccctatatataggtaaacctgaaaccattattatggaaaaagctttagcagtgactggattatctaaggatcaagtagttatggtaggagataattacatgaccgacatttccgctggtattaattttggaattgatactttgcttgtctatacgggagtttcaactaaagagctcgttgcaaagcaagacattaaacctactcatgaagttgatagttttgatgaatggcaataggattttggaaaagattattatatagcttgctattggatatagcagggttaagtagtgctatttttctgacaattaattctatttttttgtttaggttcactatcaatgcgcatctaactaaactggtagggatgtctacaaacaaaattatggttaattattaccaattgattgcatatctagagcttccatgggtccatagattaaaactcgatgattttcccttttctgaacatggtttagttcatatggcggaagtgaaaaatttatttatgctaaatacgattgtaatggtattttctatttgtatggtaataattctatatcgttatattgctaaaaataagaagtggtgggaattaattagcggattacaaaactcgatgatattggtccctttagtagtcatttttataagcttagattttgaccattggtttgttctctttcatcaggcattttttaataacaattattggatttttaatcccgttacagacccaattattaatgttttaacagataacttttttacaatttgttttgttttcttgttcggtttattggagttatatttagcaatttcattttgggtaataaaaaagcaggtcaactagacctgcttttttatttttgatttggcaaaggaaacaatagctggaattagggaaaccacaatgattccgattactacgagtgagaaatgctcttttacaaatgcgatgttaccaaagaaatatccagcactacagcaaattgcaacccaagctacatttccaataatattgtaacggatgaaatctttataaggcatattagaaccagcagcaacaaatggagcgaaagttcgaatgattggcatgaaacgtgctaaagtaattgagatgttaccgtgtttttcgaaaaagtgctcagcctcagccattttttcatcactaatgaatttaccaaagaaacggtgttttcttaatgccataccaacgtgtctacctagataaaagtttaaggaatctcctaataaagcggctaggcagaaaagcccgacaaaaatccaaacgtgtagtccgtattcaggttttgcggaaagggcggtagctgcgaataaaagtgagtcgccaggcaggaaggggagaattacagccccagtttcaataaaaataattgcaaaaaggagtaaataggttaaatctccgaaactatttacaatggttactaagtgagaatcaatgtgtaaaacaaaatcaatgagaacttgcaaaatatcattcctttcaaattatgaacgtatcttatatattattacatattctaaagagtattttgtatttaaaagaatattaccgtaaaattaagtattggaggttttaattatgtatagattaggagaaattgtttcaactacgatagttggaattaagccgtatggcgtgttcgtgttggatcgtaatggacgaaaaggcttaattcatgtttcagaatgtgatgacgggtatataaagaatctaagaaacactttttcaattggtgaaaaaataaaagcaatcgtaatggaggatgatggtgataaaaagttttcgttatcaattcgttctttaaaggaaactaaaggagatttacaccaatatcctaagccaagcaacttatatgttggacataagaaatattggaccaaagcacattatattagtggttttaaacccttagaaatcgccatggaacaatggaaaaaagagaaattaaattaatttcataaaattacttgacgttaggtgtgaaaacttggtattatatttgagcggcattgataaggcgcacatcgataattaaaaaacttgttaaatgattttaaaaaaaagttgttgacagtgattgttctcgatggaggcattctcgcaaaaaagtcgaccgcataaatgattaaaaatacatgcattagatttaaaatggtcgtatttttcagactaatactcttagaaaaaaacgaagcggcaacgattaggaatgaaataaaagcaatcatagccaaacaactatcatataaaatttggaatctggttctatgttttatcatattaacgtcctctgaattaatagaattattttaacgcattttgaggagctgtaaatagccaagaaaatgatatgatatgaataactaataataaagaggaatttgataatgaagaaaatactagcattacatacaggtggaacgatttcgatgtctgccagcaatgatactgttaaaactaatgaacaaaacccattactagatagccaatttatcaacaaaaatattgacctagttaatgaagtgattttgaataaaccttcagaacacattacgccagatgatatgttaattattaaaaaaagggtcaaaaaggcactagataacaatgagtgtgatggcattgtaatcacgcacggaacggataccttggaagaaactgcgtactttttagatttaacgatcgaaaataaaattccagttgtgctaacgggggccatgcgctcttccaacgaactaggttcggatggtgtgtataatttccaaagtgcaattctgacggctgcttccgatgaagccagtgataaaggggttttagtggtcatgaatgatgaaatccatactgcccgttttgttacgaaaacccatactactaatgtagatacgtttagaaccccaacttttgggccgctcggaattgtttataaacgggatatccgattctttcaagctttagttaatcagcatgtttgtgatattgataaccttgaaaaaggagtctatttaattaaagcttacgcaggaatccctaaagaaatatttgaaattattaatcgcccagggaccaaagggattgtaattgaagggctaggagctggaaatctaccagtagaagtagtcgagcccattcaagcattaattgataatgatattacggttgtaatggtttcacgttgttacaatggcttggccgaacccatctacgattatgtgggcggcggaattgatttagagagaatgggcgttgtattctgccaaggtctcaatggtcaaaaagcacgtattaagttacaagtggcagtaagtgctggtatgaattccaaagatattgctaagtatatgcatgacgcagtgtcatagaagtagataagagtataatacagagttaataagttttgaaagtgaggaattagaatgccaagttcaattaaagacgatttttatgatgcagtgaatggtgaatggctagcaactgcagaaatcccctcagatcattcatcaacgggtggatttatggacctagttgatgacgtggatgaaaatttgatgaaggattttgcagaaatgcgttcaggtgccaaagaacctaatacgccagaattaaaagaatttattaagttttatgaaattgcagctgatttcaaaaaacgggacgaagatggagtaaaaccacttcttccatacttaaaacaaattgaagatttaaagagttgggatgatgtaaatgccaacttaaaagaattattttttaatggcgtagaattaccagtagatttaggtattgaacctaatttaaagggtaatggagcagataaacgcaatgttttatgggctggtggtgtaagtttaatcctcccagataaaacctactatgatcaagataatccgtctggaccacagttgatgcaagtctttacccaaatgatgatgcaattactaacgaagttgggtaagtctgaagatgaagcccaagctataattgatggagctaaacgtttcgatgctagtattgctcctttccgtaaaaactctgaagaacttagcgatgtagctaagctttataatccatgggagtttgatcatttcgctgacatggttcaagagattgatgttaaaaaattagtccaagcattgattggaactgttccagaaaaattaattatcactgaacctaaattctacgaaaacttgcaccaaattgttaacgccgatacatttgaagattataaaaaatgggcctacgttaacatggtccgctcgttgtcaggctatttgagtgaagaattccgccaaattggtggcacttttgggcgagcattatcagggcaacaagaatcaatgccacaagaaaagagtgcattttacttagcacgtcgcacgtttagccaagtcgttggtgaatactatggacataaatacttcggagaaactgctaaaaaagatgttcatgatatggtggtttcgatgattgatgtttatgaaaaacgactggcagaaaatacttggttaggggatgcaacccgttctaaagcgattacgaagttacgttcgttgaagattttagtaggttacccagatgaattaaaagcagtttataagaagttgaaaactaaaacagccgctgagggtggaagtttagtggaaaacgttcaagaattttcacgaattttcttagaagatcaacttgctaagtatggtaaggaagtcgaccgtagtgaatggcatatgagtgctgatacagtaaatgcttattattcaccagaaggtaacttaatctgtttcccagctgctattttacaagcaccattttacagtttagaacaaaccgctagtcaaaattatggtggaattggcgcagtaatggcgcacgaaatttcacatgcttttgatcctaatggagctttatttgatgaatttggtaacatggacaattggtggacagaagatgatttgaaacatttccaccaactttcagaagcaatggtaaaagaatttgatgggattccatttgcgggtggaaaagtaaacggtaagttggttgttaccgaaaatgttgcagatgatggtggacttaaagcagcgttggaggcagctaaggctactaaagatgctaatctagaagaattttttactaactgggccacaatttggcgcactaaggctactaaacaacgagaagagttgctattagcaattgatgtccatgctcctgcaaagttacgggcgaacgtccaagtaaagaattttgaagaattttatgaaacctttggtgtaaaagagggcgatggaatgtatcttgctcccgaaaaacgagttcaaatttggtaaaaaatcaaactaaaaagacgattgctaatcagcagtcgtcttttttagttatttctaaagtaaaatacgaactataaaagtttaaataatcaatttatggcgtgctttacttatattttaaattagtgtagactttattggtgctatttttgatttagattcgaactaaaagggagaaatgattttgaaacaaatcgctaagtattttcaatttgataaattgaaaacaaactataaaacagaaattattgctggaattactacttatatttcaatggtctacattatgttcgttaatccgaacgttttaggagcatccgggatggacaagggagcggtttttaccgcaacagcactggctagtgccattggttgttttctgatggggattatcgctaattacccaatcgcttcggcacctgccttaggaattaatgcattctttgcttattccgtggttattgggatgcatgtgccttggcaaacagccttggcgggcgttttcgtagcttccttaatctttgttttaatcaccgtttttaaactacgagaattaattattaatgcaattccagtcgatttgaagcatgctatttcttcaggaattggattgttcgtggcttttctaggtttgagccaaggtggaattgtggttgctaacaaatctacgatggttggattaggttcattcttagttccttccacatggttgaccgtctttgggttggttgtgacaattttcttgatggttcgcaaggtgccaggggctattttcgtgggaatgattttaacaaccgtctttggtttattgactggtttaattcatgcaccagcacacattgtttcagctgcaccaagcttgaaaccaactttcttgacagctatttcacatgttggggatattaatactctccaactttgggtagtagtcttgactttcttgctggtaacgttctttgatacagccggcacattggttggtttggctactcaagcaggatttatgaaagacaataagatgccgcgcgtagggaaggcattgatgtctgattcagcttcaatgttgactggatcattattaggtacttctccagtgggggctttcgttgagtcttcagctgggattgctgtaggtggacgttctggctttactgtagttgtgacaggaattatgttcctattaggactcttcttctcaccattgttgaccgtcgttacttcacaagttaccgcacctgcattagtgattgtgggggtattaatggctcaacaaactcgtgaaattgcttgggataaattagaaattgctattccagctttcttaattatcattggaatgccattaacatatagtatttcagatgggattgcattaggatttattacctaccccattgccatgattgctgctaaacgtggcaaagaagttcatccattaatgtacgcactattctttgtatttattggttttattgctattttaaatgcataagtataaagtttgaaaataatcatttataataagagctatgctttaaggaagttggattaaaataaaaattcaacccttggacatagttctttttttaatttatgaggtgatttaatggcaaaaaaaagaaaattttatgcggtaaaaaaaggacgaaaaccaggactttatttaacgtgggatgcagccaaacaacaggttgatggttttgcaggagcggtatataaaagttttttgaccaaggcagaagctgaggaatggatggcaacagcttctagaaggaccactagaaaagtatcaacgcagactccatcgactgtgaccccttccattattctttacactgatggcggttcacgtaacactggtaatgtccgtggagggcatgtccgtaaagaagatgtagctgcgtgggctttcttaatccaaaaagatggtgaaagtatttctggatccaatggggaattcggagctaccaacaatcgaatggaaattatggctttaattaacggtctccaaaaaataatcgaccgctatggtgaaaaagcagcggtattagtggtagctgattctagatatgttttggatgcaattcaaagaaattggttaagtggatggcaacgacgaggttggaagaaagctaacggtgaaattgtagctaataaagaactttggcaggcggtggctagcattctaaaacgaatgcccaacctagaatatcgttggactaagggacatgctacgaatgagggtaatgtttttgtggatcaattactaaataaaactatggatagaatgttacgggaaccaaccgaatttgaagcacctaaaaaagccgtttctaatcctaaacctagtttagcggttcaagattcaacggctgattttgagcaattagggctattccataaccaacaaattagtgacgattaagttcaagggtaatattttgattatcagtttgagaagcaacagcactgaaaccaacttgttcaagtaaagtacgagcaatggtgttgttttttaaggcagtggcaagtaacttttcgagtcctaattcttcaaaactgaaaatggacatccgccgaagaacttcactcataattcccttatgttgttgatttcgaagaatttcaaaacgtacggaagctgatttctgtgcttgatcaaagtcccagatgcaaaatgtccctaagaattcatgggtgttttggtccgtaatcccccaaattaatgcttcattattcataactaagcgcatcatttggttaacgtaggtagttgtatcttcaatagttgcatcaatatcacgatcactagctttagcgatttctgaatcgtgacgcaactcaaaaatgtcacgaacttttgaatgtgtaagccaatctaaggcaaaatgttcggtaagaattggatgatatagttcaaatttattcataattgggctccttgttttttaatctttcctttactgtacactagatttgaaaaaaactgaatgaaaaagggacgatggcattcatatcatgtcatcgtcccttattttttgattatctttgttgttgtttcataaaatcattgatgcgttttaagtcatcatcagttggtttgtaggaattttccttgattcggtgtagtttttcaaccgacaaatgtgccccaaatgctacatcagcatctgttagatcatttttcttttggcagttgatgatttttgctgctagttctgtcacatcattcataatgaattcctccataagctcttcatctatagttaaaatcgtaccacaatttttacaataaacataggaattatattgtcaaaacgctgaatttatcccagtttaaaaaagttgtcggtattcattttcgaagaagctatctttagcatataccaatgaaatcggacgcgtaaggtctaaaccttgaattttgagtaatgcgagttttttagattctaattccgcttggactagagattggtacatgaaactgactccggtcgtttctaggagtttaataataccagtggaacttcccaactctagcacttgcgaaaaatcttccttatagatgttaaaagaactggcccaatcggtaaaaattgagcgggtacctgaaccttcttcacgaagtaaaagaggttccgaaagtactttttcaagtgctaagtttttttgattggtgaggggattacttgaacgtgtaacggctacaaatttttcgtgggtaacgatttggctaccatatgcatgtttatcaaagtttccttctaaaacagcaaagtctaaagtaccttcgtcgatttgagataaaatatcgcgtgtgttagaaacgatgcattgaatgttgtgatatttttttcgccaattttggattaaggccggagcgataaggatactaaccgaatgcgttactccaaacttaagattggttgtcgaaatcggctggcgtaattgggttaataatttatcttcttggtgttgagtagtttcaatgaaatgagccagttgctcacctgcactggtgatttctaaacgaggatggtgatattcaactaattttagttgtagttcaccctctaagcttttaatttgttgagaaactgcaggttgcgtgatgaataatgctcgggcagttttagtatatgacttatttttacagagtagtgcaaaagtggcataacgattatctagcatctttttcatccttataagtttaatttataaaccaattataaaacataattatattttatctaccatttttgatacgatattaagcgtgaagttaagagataggagagaagaaagatgactcgaatgataaaagattcaagtttttgggtagctatattagttacattgctttgtgcaacagcaggatcgctattggcacaattgccttactttagtttaattggagcattggtaatttcgctggtattagggatgtttgttcaagttagcccagcagtagttgagcgttctaaaaaaggtattggttttatttcaaacaagtttttgcgtttaggtattattttattaggttttaaattaaacttggttgatttagccgatgcgggtgttaaaaccattctattagcagttttcgtggttacatttacgattttaggtgtgtataccttggctcgtaaatttggcgtggattctgatctagcaatcctagttgccagtggtactggtatttgtggggcagcagccgtaatgggggtttcaccacagattcaagttcctgaagaccaacgtgaattgaaacaagaaaatgaggtaatggccattgcggcggttgccatcttgggaacgttatttacttttattgaaattggattgaaacccatgcttcacttaactacaactcaatttggggtggtagctggtggatcacttcatgaaattgcccatgcggttgctactggtggagcagatggtccggttagtttagatacggcgattattactaagttatctcgtgttttactgctagcacctgctgcattaatcattggtttttggcaccgtagccgtacaaatatagatcgcgaaaacgttgttcgtgggaaattaccaattccatggttcatggcaggttttattttagctagtgtaattggaacttttgtacctttaggcgcaactgtattaggctggttagttaaatttgcatacctcttcctaggaatggccatggctgctttgggaatgtccgtaaacttccgtgttattttcaaacgtggaaaaggtgcatttttagctgctttcttaggttcaattgtattattgattttcgtaattattgtaagtaaattattcttctaaaaaaataaaaaacgaattgatggatttgcaaaaaggagcagaatcatcaattcgtttttttaatgacttaaaatcgtcatcatgatggggaccattaccagagaaagcagcgtggtttcagttaccatgattgacgcaaaatctgcgtcagcatcgtaaagttgggcaactactggggcattggtcatcacaggcatgcaagattgtaaaataaatacttctttcatcatcatgggcatgtggcttggtaatacaagtaaagccatgatgattggagcgaaaataaatcttccggataagacacctaaattgtctttttggaaacgcatgtttttcaaaccagcgtcataaacagaaataccaatgaataacatggagagtgggatggttaatccgccaagataattaaaactcgacattagaaaattagggagtttgatgtttaagacaatgaggacaattccaatcataaaacctaatagcggagcggaaaaaatctttcgtaaagcatctttaaaattcatttgaacgtgattggaactatcacgttgaatgaagtagacgcctagtgtccaaaaaattgtggtatttgccatataataaacgaggacatagggaagacttttatcaccaaagatagctagattgatcggtaaacctacaaaaacggtattggaattgaagaacattgacataaatagtccatgtctcttaggatcaacttgaataatccgagccaccaaccatgaaattcccattaaaataaacattgatagtacaggataccaaaggttagggagcagtttaactaattcactcttagtaaaatctttagtaatcgaaacaatcatgtatggcgggagggccacttgggtgacaatcttggcgattaattttttggaactttcagaaaaccaatggagcgaagcgaggtagtaaccaacagcaaccatgacaatgattactaaaacgccttgaatactttgtaataacataattaaaaaatcccttcacaattgtttaactactattctaactcaaaattaatggtaaaattacatttagtaaataaaatggaggacattaaaatggcatttattcaaattccacatgacatgacagaactacggattatgatggaacaactaaaagaaatgggtaaagaggctaatgaggatcaacttatcgaacaagcagtggtcgataacgcgcaacagttgttagatgaagcgcttgatggacactactttacctgtaagttagaagatggaaaattagtcgtttatgatgtgatcaatttaccaactggaagtatcgaaccattaggtaaaaactttaaggaagactttattactgacgcggataacctttggattcatctttcaagtaatttaaaccgaattgcgggcggacgttagttaataggaggaaccgatgagtattcaattaattgcaagtgatattgatggaacttttttgaatgaccaacgtgattttgatcatgatcgttttcaagcgcaacttgatgaacttaatcgacgtcacattaaatttgtggttgcgagtggtaatcaaatggcccactgccaagaggtttttgccgacgtaaagggcgacatgacttttgtggctgaagatggggctttgacgatggaacagggaaaaattttggatgataatccgctgaaacccgctttgttgagggatgcaatagaatatttattgactacgccagcctttaaagacgctaaaattattctttctagtcaacatcgggcgttcactaatatggaaaagagtggttccgactggtccgcgagtgcttatttctacagccagcttacaaccgttgatcattttaaagatatcacggatccaatttataaaattgatacgcattggaccaatctcgaagatgttcgagaacaagccgcaatgttgaaacgagaccttggaggagatttaggaagtgtgatgagtggtttcaatggaattgatattacaatgccacatgtcactaaagcatacggtctccaacaacttcaagaattatggaaagtttcgatggatgaaacgatggcctttggggatacccaaaatgacgaagctatgttaaaacatgcccgcttgggttatgcgatgaagaatgcagaacaagaagcactcgatgctactgatttaattacaccgctggataataatgatagtggtgtattggatatgatcgatcgagtgcttagtggtgagattgcataaaaccatgtaaagtaaattggtcgaatcaaatagacatactttaaaaatatcttgacatttccgattattctcagtatgattagtgaaaattaaatcgagtcgctttaagttaatccagagaggttaataagctagcagagtcgccatcaacaggtggagtggacgcggttagcgccggcccataccaacttgttggtggctttttttgtacccaaatagcgatatcgaaaaattaaaaaggggattcttgattatgaatgacgaacttcgtagcaaaattatccagcaactacttgatttaaaggcggtttcgatttcacccaatgcaccgtttacttatgctagtggaatgaaatcacccatctatactgatttacgaatgacgattagcaagccagttctacgttcagatattgctaaaggattgagtgcagaaatcaaaaaagcttatcctagtgctacggtaatcggtggggtcgcaacagcgggaattccgcacgctgcatgggtggctgaagagttaggcttgccattaatctacgttcgatccaaacccaaggatcatggagctggcaaacaaattgaaggtcaactcaaagctgacgatcaagtagttttaatcgatgatttgatttcgacgggtggtagcgtacttaaagcggttgaagcggttcgtaaagaagacattcaagcaattggagttgcttcaatttttagttatggtttaccggattcaactaagaattttgcagaacaagatactgaactacttagtttgctcaactacaatcaaatggtggattatcttcaaactagcaatgccttatccgctgaagaggtagcttcggctaaggagtggcatcaagatccatggaattggaaaaaatagaataacactttgtttcaattaaatcggtttcccgagaggaaccaattgaatcggctttttaagctactcccggcgagacgattcgattggtgagtagctttttttataataatttaggaggaaaaataatgaatatgcatgacttaaccactgtagaaagctttagtgaagaggacgtgttacataaaattcggttatctgaggaatttaagaacggtaagacaattgaacttactcgaccggtctatgcaatgaacttattttttgaaaatagtacccgaactcatactagttttgaaatggcagaaagtcgtctaggaatgcgactccttgagtttgaagctaaaactagttcagttactaaaggggaaagtttattggatacggttaagacaattgatgcaattcagacggatattgcagtcatccgtcatccgcaaaacgattattataaacaactgctagaagccgatttgaatattagtattgtcaacggaggcgatggaagtggacaacatccttcacaatcattactcgacatgatgaccatttatcaagaatttaaccactttgacggtttaaaaattgcgattgccggagacatcgcacattcccgagtggcccgctccaatgcaatgctattaaacaagctgggtgcagaagtttacttcgccggtcctgaagcatggatggccgaagatttgaaggcttatggaaccttcctaccaattgacgaattagtagagaaagtggacgtcatgatgttactccgaattcaaaatgaacgtatttctcaagataccgcaattaaatttgaaccacacgaatatctccaagaatatggattaaccttcgaacgagccgatcgaatgcaaccaactgctatcattatgcatcccgctccagttaatcgtggtacagaaatcgaaagcagcttggttgatggagaaaaatcaagaattttcaagcaaatgactaatggaatgtacatgcgcatggcaattttaacggacgtattagaggccaagggattgattaagggaggattgcattaatgaaagttttacttaaaaatgcccgagtaataaaaagtcatcaagtgcaaaaagctgacgtccttgtggaaaacgaccgaatcactcaaattcaacccgaaattaacgttgaagctgaacaaatcatcgatgtaaaaaagcaacttttaatgccaggactggtggatatccacgttcattttagagacccgggccaaacggataaagaagatgtagttagtggcagtgctgcagcagttaaaggcggatttacgacagtattaactatgcctaacgttgatcctgtccctgatacacccgaaaaaattatagcgatggtaaaacataatcagactgctggtagtcttcatatcggacaatacgggtccattactaaaaaacggaccagcgaagaattggttgattttaaagctttaaaagaagcaggtgcagtagcttttagtaacgatggtaacggcattcaaactgccgaaaccatgtatcaagcaatgcttcaaattaaagaagtggggctaccactggctgcgcatgtagaagatgaatcactaatgcaacatggggtgatgaatcaaggaacggtagccgaaaaattgggtttaccaggtattacagaattggcagagacagctcaattagcacgggaccttgaaattgcgcgtaacacaggcgctcattatcacgtttgtcatgtttcaaaagctcgaagtgtggaattaattcgccgtgctcagcgagacggcgtccatgttaccgcagaagtcgcacctcatcatttatttcttgatgaaacgatgatttcgatggataaccccatgatgaagatgaatccgccactacgaaccttggaagatcggcaggcactcttaggggggctgctagatggcacaattggtatgattgcaacggatcatgctccgcacacggtggaagataaggctggatcgatgaagaccgcctcttttggaattacagggttagaaacagctttcccactactctacactaagctggttaaaccgggactttgcacggtagaacaactagtggaacggatgagcattcaaccagctgaaatttttaacctcaaggcagctgggcaattggaagtgggagatgtagctgatttaacggtaatgaatattgaagatgaatatgaaattaaagaagcagattttgcttcaaagggaatcaattctccgtttattggtcaaaaggtttatggacagacacaactgaccatggttgctggaaaaattgtatatcaacgggaagggtaatttaaaatgaaacgttatttaattttggaagacggtactacatatgaaggaaaggcgattggagcaaatcatgaaagtattggagagctagtttttaatactgggatgtcaggatatcaagaatcgattaccgaccaatcatataatgggcaaattttaatgtttacctatccgttaatcggaaattatggcgttaatcgagatgatttagaatccgttaagtcaagttgctttggagtggtagtccatgaggtggcacgtcgagctagtaattggcaaatgaatatgagttttgaagaatttttagtatatcaagatttgcccggtattagtggagtggacacgcgagcaattactagacatattcgcgaacatggagcgatgaaagcagcattagttaatgaaatttcagacgctaagtttgaagaatttcatgcaactaatttgatacaaaaccaaattgaaattagctcaactcatagcccataccctaatccagccaacggtcgtaaagtcgtagtaattgattttggactcaagtattccatcctacgtgaacttgctcgtcgcgactgcaacgtaatggtgcttccatatgatgctactgcaaaagaagttttggcctgcaatccggatggagtgatgtttactaatggacctggcgatccggaatcaatgaatgaaagtgttctagaaatgattcgcacggtggaggctgcggttccagtctttgggatttgtatgggacaccaactttttgccctagcaaatggtgctaagacaactaagatgaaatttggacatcgcggttttaaccatccagttcgcaacttagcaacgggacgaattgatttaacttcccaaaaccatggttatgcggtcgaacgtgcttccattgcaaacactgaccttgaaattacccacgaagaaattaatgacgaaaccgttgaaggactcagacataaacaatataaggctttttccgttcaattccatccagatgctgcaccgggtcctcatgatgcggactacctttttgatgattttatggaaatgattgatgaagctaaacaaacccaggaggacaagtaaacatgcctaagagagaggatattaacaaaattttagtactcggttctggacccatcattatcggtcaagcggctgagttcgattattctggaactcaagcttgtctttccttaaaagaactcggatatcaaacggttttaattaattccaatccagcaacaatcatgaccgatacggatattgccgataaagtttacattgaaccattaaccttacaattcgtttcgcaaattttacgtaaggaattaccagatgctattttgccaaccctaggtggtcaacaaggattgaacatggcaatggaattatctgaagctggaattctggacgaacttggaattgaactgcttggtacgaaattagatgccatcgatcaagctgaagaccgggaacgtttccgagctttgatgaacgatttgaatgaaccagttcctgattcaggaatcgcaacgacggtggaagaagcagttaactttgcggatcaaagtggttatccagtaattgtacgtcctgcttttaccatgggtggaactggtggtggaattgcacaagatgaagctgaactacggaagattaccgccaacggtttaactctttcaccagtaactcaagttttaattgaacaaagtatcgccggactaaaggaaattgagtttgaagttatgcgagatagtgttgataatgccatcgtagtatgtaacatggaaaactttgatccagtaggaatccatactggtgactcaatcgtttatgctcccgttcaaacgttaacagatcgtgaagtacagatgctacgggatgcttcactaagtattattcgagcattgaagattgaaggaggctgtaatgtacagttagctcttgatccagcccaagatcgttattacgtgattgaagttaatcctcgagttagccgttcgagtgctttggcctctaaggcgacaggttatccgattgctaaagttgctgctaagattgcggttggattgaccctagatgaaattttaaacccagttaccgggactactttagctgaatttgaaccggccttagactacgtagtttgcaagattcctcgttggccattcgataaatttgttcgggcagatcggcgtttgggtactcaaatgaaagctacgggcgaagtaatggcggtagggcgcaacgttgaggaagcaacccaaaaagcaatccgttctcttgatatagatattaattatattggcgatgaagaactcgccgatttaaatgaagcagacttagtcgatggcattatccatgcgcgtgatgatcggattttttatctgtatgaagcaattaaacgtggatattctgtggataaattagctgatctgactaagatcaacgtttactatttggataaattattgcacatctacgaaatcgaacaggaactaattgctacgccatttaatgctgatgttcttgagttagctaaaaagaatggtttctcagacgaagttattggcaaaatgtggaaaactaacgaaaaagaagtacgagcatattgtgaacaagtgggattatcacctgtttataaaatgattgatacttgtgccggtgaatttgaatctcaaactccgtattactacagtacctacgagctagaaaatgaaagtattgtctcgaaccgcaagtcaattgtagtactaggttcaggcccaattcgaatcggacaaggggttgaatttgattatgctacagtgcattcgattcaagccattcgccagatgggttatgaagccatcgtagttaataacaatccagaaacagtctcaactgatttttcaatgtccgataaattgtactttgaacccttaactgtggaagatgtgatgaacgttattgacctagaaaggccggaaggagtaattgttcaattcggtggccaaacagcgattaacttagccgaaccactcgctgaacggggaataaaagtttttggtacaactgtggaaaacgttaatcgggccgaagatcgggatgaattcaataagctaattcaggctaatggtattcgtcagcctcaaggacgtacggcgacaacaacatctggagcaatcgaagccgcagaatcaatcggttatccagttttagtccgtcctagctacgttctgggtggacgggcaatggaaatcgttcatgccaaagaagaacttgaaaattacatgaagaatgccgttaaggtttcccataaccatccggttttggttgatcagtatttagttggtaaagagtgtgaagttgatgtaatcagtgacggtgagaacgttgtgattccaggaattatggagcatatcgaacgttctggggtacattcaggagattcaatgacggtttatcctgcgcaaactctttctcaaaaggtccaagatgaaattgtgaaagtttctatcaaattagctcaatcgctcgaatgtatcggattgatgaatattcaattcgtggttcataatgacgaagcttatgtcattgaagttaacccacgtgcaagtcggacggttccgattatgagtaaggttactgatttaccaatggctcgccttgctacgcgtgccatcttaggtgaaagtttggtcaatcaaggtttgaagcctgggttgcatccagctggtgaaattattcatgtgaaagcaccagtcttctcctttactaagctagataacgtagacagtttattgggacctgaaatgaaatctacaggagaagtcatgggaagtgaccgtactatggcgaaggcgctctataaagcgtttgaaggcgctaaaatgcacatgccagaccatggcaaagtcttaatcacggttaaagatgaagataagggagaagccatcgattttgcccgacgtttttgggaactaggttatcaattggttgccactaaaggaactgctcaaacacttgcagcacatggtctgaaagttgagacggttggtaagatgactgaagaaaataacattgtagaccgaattcacgatcatcgcattcaaatggtgattaataccatttcagacagtactactagtgctgccgatggaatcaaaattagaagtaccgcattaacttatggagtaccactttttacggcattagataccgttgacgctattttacaagtgcttgaatcacaagcttttacaacattacatctttaggaggaaaacaaatggatcgcttagaaacgacaattgccggagtcaagttgaaaagtccggttatgaatgctagtgggacggctgcatatggacaacaaatggctaaaaatattgatttaaatgaactaggagcattcgtaattaagtcgacaactatggagccgcgtgcaggccatccgtggccaactaccgcggccaccactggaggctggctgaatgcggtcggtttgaagaatcctggtattgaacatgttttagcttacgaacttccttggttagctgaaaattatctggatctccccattgttggaagtattgctggttctaatccggatgattatgttgaggtagctaaacgcatggcgactgccccgaatgtgaagttcattgaagttaatatttcatgtcctaacgttgataagggtggtctagcatttggtactgatccagttgtagttgaagatatgacccggcgcatcaaagcggtagttcctaataaacccgtcttcatgaagttaaccccgggagtaactgaaattgttcccattgctttagctgctgaacggggcggtgcagatggcttagtaatgataaataccttaataggaatggaaattgatttagaaactagaaagccacgtctttccaatgggacgggcggtctttccggaaaagcgattcatcccatcgcagttcgcatgattcatcaagtacgcgaagtaactaatttaccaattattggggttggaggggtattttctgctaaagatgcgttagaattaatggtagctggagcaggggctgttcaagttggatcagcaaattatggtaatccacatgcttgccacgacattattcaaggcttagttccagcaatggatcaatatcattttaacaacattgcggagtttagctccgagaaataagcggaggtttagtagtgactgaacgagtagaatttaaaccaacaagtattgatgatttaagtagccaatatgatgtaattattatcggagctgggagtacgggtttaaccagtgctctagaactgactgagttgggcaaaaaagtggttgtcctagagaagatggagaagcctggtggaaactctatgcgggcatcttcagggatgaacgccgctgaaacagcaatccaaaggcatgaagggattatcgatagttatgaatccttttatgaagatacatataaaggtggcggcaaacaaaatgatgtcgaaatgttgaaatattttacaagtcatgcggattctgccgttgagtggttaaaagaacatgatgttgttttagatgaaatcactttgaccggtggaatgagtgtgaagcgggcccatcgccctagtagcgcccctgcaattggtggatatttaattcaccaactactaaataagttagctgaagaaaaggttccagtagtttgtggagcaacggttagggaaattgatcgtggggataatcatcaatttaaagttgattttgccgacgcccaaggctcaaaccatttacttaatagtgcagcaatcattctagccacgggtggtttcgctgctagtgatgctttaattaaaaaatatcgtcccgatctcgttcactacaagacaactaatcaccctggggcgactggcgatggattacaattagcggagaatttaggtgctcaattggtagatatggaccaaattcaagttcaccccaccgtttaccaagatggagaccatgcattcttaattggtgaaatggtacgtggggaaggcgcaattttagttaatcaaagtggtcatcgatttgtaaacgagctagacacacgtaaagttgtaacggatgcaattaacgctcaaaaccaaccagatgcctatctgatatttaatgcagcgttagctaaaagagccagtgcgattggtttttacgctcacatcggtctagttcaacatggtgatcatattgatgagttagcgaagactttgggattaccagttgctaatctaaaagaaacgatgcaacagtggagtgatgtggttgctaagcgtaaggatgaagcattcggaagaactatgggtttggttgatggttttgaagaaggtccttatatggcaattcatattgcaccagctattcactatacgatgggcggactcaaaacgtctgctaaagccgaagttttagataaaaaatttaaacccatcaaagggttatatgccggtggggaagttgctggtggattacatggaaataaccgtatcggaggtaactcaatcgccgaaacagtggtttttggattgcaagctgctcgccaagcattcaaaaatttataatagatattatgtacaaatatatatataaccaaattaaaggtaagattttgttaaatgttccaattgacaaggtcttgccttttttagacaatcaatataaatatgctttttttataattattattagtacaataatttttgaagagtaaaacttttgtaaaggagaaaactttgagaagaaaaatcatttctttaggaatgttgattggatgcatcttaatcttagttggttgtggacaaaaacaaccacaaactaagattcctaaagcagacgccgatcatttaaccattacaacgcagtatcataaaaataaacaaaacattgaattgttacataattttttaaaagattcaatggttcaaaaagctggtatctacacgaattttaataataatcaaaaaaaatccgataatgccacgggacatgatatgttatctgaatcatcaggtttatggttagaatacttggcgcaaactcatcaaaataaggcttttcgggagttctacaaaaataccaagaaatattttgatcaaggtcggcaatttagttatcgcatcgaaggtaagactaagaaaaagtccgatgtgaatgctacgctggatgatttaagaattattcgtgctttacagatttatgcgcaaaataataatagtaaaaaatatcgacacgaagcggctgaacggtttgctatgctacaaacgacaagcattcaaaaagcacgggtacttaatttttatgatgtacgtactaaaaaagctagtaacgaaagttctttagcctactatgatttggctaccctaaagtactttgaatctgtatctaaaaaagagcggggatattatcgagaacaattaaagctagttgaaaaaggatatctgggagatatttttcctttgtacgctccgagctacaactggaaaacaaaccaatatggcacgaaaaatctgaatacttcagaagctttgattacagtcctgcatttggctgaaattggtaagatgaaacctgaaacagtcagctggttaaaaatgcaaattgataataagaagttatataacagttacactactgctggagcaatcgaggaccataaccaatcaacaggtaattatgctatagcagcaatgattttcgccagaaatggtgatcgtaaatattatcaaaaggccatgaacttggtttgggatgatcaggttcgaaataagaattcaaaaatttatggggcattaggtgatacaaaagataatgacgcttactcatttaataacctattggcattgttaacatcgcaatactaaaggatgggatgaaatggtttcgattaaaaacagttggagggtatttcaaaaacatatatcacctgctgccgttgcaacggctttggcagcgattatttgtgctgtcattctctttataccaccgattaatggctatgccgataatggagatttttatcgggcaatgttaagtaacgggatttatcgactaccaaccaaggataatcagtatattggttatgtggtaactaagtttgggattttaaagtattttaatgaaaataacgttgctgttttttcatctcaagcgcttttcgttaaagtcgctgtaatactaaataagttattttatagtcatcgttactttgatattcgcttcttaggtatcgtctattatgtagcttttttacctggtatctacctattaactaaagcattaaccggaacttggcgacgtatacgaagttatgtgattgcaattctagtagtacttatctttgcggatgcttcatttattctgtattttaattcctttttcgctgaaccgggaatgttaatttcattcttgtatgtggtagggtctctcattttattagcccgtggagattattctaaacgctggaaattgttattaacctactttattagtgttgtggtcttaattactagtaaacaacaaaatgctcctttagcactaagttttggagtcatgtcagtggggccctttttcctgcccggtttaaaaaaggctaagaaattagctgttatgggtggtgttgttgctactttgggagcgggagttctgacgtatagtttaatcaataaagaattcaacgacgttaatcaatatcaatcattttctcatggagttttgatggaaacgggagatccgagtaaaaatattgccaaaagtgggctgagtgagcaatttgccttaatgcgggagcaaaactattatgctaaaacttttgataccgttgacccaagttctcactacgttagaaaacatttaattgaaaaatacaactttgcgtggattattaaatattatgctagaaatactgatcaatttttacgcttactagatgtagctagtaaggatattatggttactcaagtaaaggcagtcggcgattataccaaggattctgggaaaaaagcgggtcaacagagcaccttttttacactttatagttcgctgatggaagctttctttccaggaaaatatgcctttttgtgtctcttggctatcacatttgtggctgtatatgcagttagtgcttatattgactttgtagctggaagattatttggcgttgtacgtttttttctagtgctgggattgatgaccatttgtgtgtttgttccaattgtttcaattattggtgatggcgatgctgatttagccaaacatttattcatggtccctctcagtttggactttaccttcataatgtttatttcagacattctaaatcatcaattatggctaactgaacaggaggaagatggggatgcgtaaaataattatgttttttttaacgattttcttcatggcccttggcggagtagttcaagccacccgaacagcacatggtagtgaacgcgatgataatcgtgttttgctcgtttatgattctcaaaatactatcgaacaggatgaaaaaaagattgataccttacagcgaatgttagcagggatgggacttaaagttaagacagttaaaggaagtgaatatcaaaaaggtgagttaaaccatagttatcaaggggtaattaccatgattaactggaaacaagcgtcactggataatccaactttcgttaaagatcgtaatcaatatgacggtgttaaacttcatattggtgaaagcttagatcgaaccgaacaaaaacagttacaggttaagctaaagacgatttatcaacaacaattcattttaagtgaagatagcagtacagaaatgttgccatttgtggaacgcatggatgttttaactggagttccaaaacaagcacagagttacggcatgttaaagacgcaaaataatgaaggtcaatcctataagtatggggtaattaatcaaaaacaaggttacttgcctttcttcaacaataaaggactgggattaattacagctagcaagatgatagctattttatttaatcgtcaagaagaaaccaaaccgttgttaacgattacggatgtttcaccttatagtaatctaaagctgttagatcaattaagcgtattctgtgaaaagcatggtataccattggcaatcagtacttccacagtagctaaaaacacggaaatgcacgcgtataaaaggtttaccatgtatttacgtagacttgaagatcgaggcggtgtgattttcttacaagctccggtgattgggggagctactgcgaataacgcaggagaattgagtgaattatttgataactatctacttaatttggcacaaaatcaagtttatccagttggaattagtgctcaaggtttttggaatcaggatcgagtcttgaggaatagtgctttgaaaaaagctaattatcagatgctacttcctaataaaaaagtagtttatctcgatcaagataatcaaggtggcaccaatagccgaagttatttagcattaccagcctcaagttttaataaaattaaacaccaagcagatgtacgatttgcaatgcccacagcgctaacttttaagatgcctgatagtaaggttaagttgaaaaatttaaaagaacaaattcaagcgttgaactttgaatggcaagctccggatgaagctattaattcaaaaattgattttgcaagttcatcacttgcttttcaaaatggacagtatttggtgaatggtaaggagacggaagttgaagttaattcaagtatggaaaatactgataagccaactcctacgccggcgctatttaaaggctttttcagagttgaagggcaaattattaccgtgttcttcgccattatctttaccgtcttaatcatttttatcgcctttggaagaaaaatttacaagaatatgttcaagagataggaggaatgaatcatcacaattttggattttttcctaatggtagctatcattgccatttggggaacgttaataattaatttgattttaacggtagctggatatacgtggtatctccaagaagctcccaaaccggataagcaacttcctgaaaagattccctttgtgacggtaatggtacctgcacataatgaaggaatcgtaattgttaaaactgttttatcgttgctcagttttgactacccccatgatcactatgagattattgtgattaatgacaattcaagtgataattcggcagaattattaaaagaagtccaaaatgattttggcgaagaacgtttgaaagttattaatacagacaatgtgacggggggcaaaggcaagtccaatgccctaaatattggtttgaagcaagccaaaggaagtgttattgcaatttatgatgcagataatactccagaacgtggtgcacttcgtcttttagtagcagaacttttaggaaatgaccgtttagcggcggttattggaaagtttagaactagaaataaagaagcaactattttaaccagatttattaatattgaaacactttcgtttcaatggatggctcaagcaggacgtcaacggctgtttaagctatgtacgattccaggaaccaattatgttattagacgcgaaattttagaaaaaattggtggttgggatgttaaagccttagcggaagatacggaaattagttttcgggtctagatgggatatcaaattaagtttcagccgcgtgcggttacttgggaacaggaaccacaaaccttagatgtgtggttccatcagcgaacgcgctgggtgaaaggaaacatttacgtggtcgttaaaaatgccaaattactctttaaaaaggccggacgtcccattcgctttgacttactctatttcttgtcaacgtactttttattgatgaccgctttgattctatctgatgtagtttttgttctttcagtcgctgggttggctcattcagatttacaaggttttagtaatgctttgtggttatttggaataataatgtttatcatcagtacctttgtcacggttacaaccgaaaagggtgaaatgcgttttagcaatattctttatattatttttatgtatttggtatacagtcaaatgtggttagcagtcgcagcatacggaatggtggggcatattcgtgaacaagtctttcataaacaagcaaaatggtataaaactaagcggtataagtaaattaattattttaacattaacgatattattaatgtcattagttggcgtgggccaagtacatgctgaagacctaacttatactcaaaattttcaaaatgatacaacaactttatctggtaaatcaacagcaacgagcatgtactttaccaagatggattattggaacgttaaaaaagctacctttaattttaattatcaagtttcacagttagctgataaaacaacgtctgatatcacgttatcaatgaacggcgttaaattttattcatttcgtccagagcataagagtggttttcagagtaaagctgttgagattccgctagaactcctgcaaggtactaataaacttgaaattaaaggacaaattttaaataaaaaagatgctaagaattatgatttagcacaaactccagctaattggctaacaattaagtctggtactaatatgaattttaaatatgaagtaaaagatccagaaaacacattgcgttcattttatgatcatttttctggtgaagatacaatagctaatcagcactcaaaaattgtcacccctgatcaaccaattaaagctgaattagcggctggtatgactgctctaacaggtatctcgcacgcaactactacaaacaataaccaaatcagtgttgtccaaaatacaaatatggatgctactaaaggtgattatatcttgtatgtcgctaaatatgataatcttcctaaagctttgaagcaggaaattagcgaaaaagacgttgagaaaagagcggtaattaaaactcactatactaaaaaggtgattatttaattgtaacggccaaaacagatggcttattaaaaaaggcttcccagttttttgctaatccagaactaatgcaacagacgaataagagtacagaaatgatttcgtatttaacaaatacctttatgtctaaagttcaagatagaggtaagtatcaactaaccaatgtcattgataagattaaaggtgctggacatcatgaaaccaattatttggtaacattgcctaatgaccgaacaaacgctgatgggtccgaagtgaaattacattttcgatatagcaaaaaccttaacttcaaacgttccttagtgacggtgtacgttaacgatacaaccttaggaagtaaaaaattaaccgctgctaaagctaatggagacgaagttactttggaggttcctaaagggacttccttaggaaacagctttgaagtccgagtagcttttgatttggaaatgaaggatcaagaaatttcagataactctgaaaccccttgggcagaagtagatacgaattctgaaatgaaggttaaatcagaaaagagtaacgatttactctttaccaactatcccacaatctttatgaagaaccaaacatataacaacttagcagtggttatacctaaaaaattaactgcgatagacttcaagagtttaacaaatatttttaacttgatgggtgcttacgctaagagtaatactggaaaaattaaattttatactgaacagcctaatcaggatacaatgattaatgataatttaattgtacttgggaccccttctaataatgcaatgattaaatccttgaataaagatttgtatttcaaatattctgatgactatcgaggatttgtttctaatgaaaagctcagtattgaggaagattacggtaagacgattggaacagcgcaactaattcgttctcctgaaaatagtaaaaagggcattctagtcctaacgggggctactccggaagccagttatctagcttcgacacagctcaattttaaaaagaatatcgatcaatttacaggcgacgcaattgtggtagatcaaaataacaaccactatagctatcgcttcaaggaaaacaagtatattgatcgaaatttagaacacaagcggaccattagtaataatagtcaattaattatttatttgggaattgtctttttagctttgattgtcattggttttggagtttacctagtttttagaaagcaagccatgatgaatggaggacgtaagaatgcaaaacaaaaatagcaaagatcgtttgtatgaagatattggtctactcctacttttattaatgcttagcattacggccgttttgatgatgctttctcaaaatatcgttgtgaatataatttatttaatcatcactatgggaattttaattgtaacttactttatgggaattattcccagcttattagcaaatatggtgtttattgctttccaaaccgtagttatgttgtatgaatattttggtttgaatcacgaaattcagtggtcgttgcttttctggctaatcatgccgttgttgatttcactgaccatgtatctttcaacacggagtcagattgcgttgcaaaaggcgaatagtgatttacatgcggctttggtagagcggggcgcctttgatcaacaaactaatttgcggacgatggttgcatatgtggaagatgccggagtatttattgaaactagtcgacgctttgagattcccgtatccacgctaattattaaaataagatattttaatgatttacggagaatgatgagtgatcgccaacttcagcttttattacaaattgcttcagaggtaatcaaaagttcgacgcgtgataatgatattacctatattttggaaaatgaagatccaacgtgggcgattcttttgtacactaatgctactggaggaagaatcgctggacaacgggctaaagatgcgtttgaaaaacggattaaggaaagcccagagttagtgaatctcgctatttcaatggttgtgggtgtttcagaatggaacgcagaggaaatgagtaatccatatgatttaatgaatgatggaattaaagaaactcaatatgatgtttagagcagcataaaaaagaaccttaacttcagaaaaagaagttaaggttctttatttttattagcaaattttattaccgatatctttcatatctttagcgagttcgtccttagtttgggcatctgttggttcgtaattttgaacagtaacggcaccatctaagatgctactatcatcactgagtttaagcagtcccattttataatctaattttagcccattacctaaataattagcctcttctttactagtagtaagattaagatccgcatcgttttcaattgtatccgtgtaagcttgatcaggaacagatgagataactagttggaatttattaccaatagcacatgatccacctaattttgaaaatttactagaaccatcatcaagtgctaagaagatatgcttaccgtcgatatctttctttaataaataatcttttgtattctctgtaatattaattttcataataaaattcctcctatgcgtaaaacaaacactgagctcctacgacttgatattaccttaatttaaaacagaagttaaatattgtgctcaggatttggttcggtaaattaaatcagttgttctagctagcccttcaggctaaaatgaaggaaacaagttttggggaggaaccagatggaagttagggctgttaatcatatcgcaattatttgtacagactacgttttagctaaagaattttatgttcataaattagggatggaagtagttgcagaaacggaacgcgtagatcgaaacgacgtaaaactagatttaaaatatggagatttgatgtttgaaatttttatcaaaccagacgctcctcagcgggtttcatatcctgaagcagcggggctacgccacatttcgtttgctacggataacatcgaaaaagatgtagactatttacgttccgtcgggattaaagttgaagatattcggcgggatgaattgaatcagcaaaagatgacgtttttcttcgatccagatgggttacctttagaattacatgaatgataccaaggcagagttacgataattaattttatcgtaactttttttgtatgaaaacgtatttttacacgtgtctaaatttaaactattgcaaaaataaatatgtggagctagaatagtttatcgagaaaaacatttttggagggaataaatgaaatatgatttgacgaaaaaatcaaccaaaggagcgcaaagaactttaagagcattttcggatgcgatgtataagctactagcggaaaaatcgtatgacgatattagcattaatgaaatttgtaagattagtaatttcccgcgggcaactttctataactattttgaagataaaaaagatttattgaattattgttggttattattcaaagaagaaagcaatattgagcagtatcatgacgttgctgacgaagatcttcaagaatatgtattgggtcaaatctttgaggccatggatcagcatcgggaactattaactcaattagcaaagcataatgctaataatagttcgatcgtgagcagcatttatgagtactttaaaaacgaggctattacgattttaaagcaacatctaaaaaatcaaacttcgaaagtaccactagaattagtagcaaagcattatagtaatacgattttgttggtacttaagtggattttcatcgagaatcatccattgtctaagagagaagcgatggaatatgttgatgagttactaggaaaataagcattaagagaagagtgaattgattaattatagataggagagaagagtatgagtaagtatatcaaacaaaacattgccaagtttgtgacttggattatcgttttgattttaggaatcgtaatgttacctaatatttctagcttagtagctgaaaaaggtcaaaccaaaattccggatacggctaaaagccaagttgctaaaaccattcaaaaagattggggccacaaaattagcaatacgcgccaggtcgttttggtctttaataatggtgaccaagccttaacccataagcaaaaagatcgtatcaatgacactattgataaaatcaaagataatgaatctaagtatgatattaaaggagttactgctcctaacgatagtgaggcaactaagaagcaattaatttcaaaagataaatcaacccagatagtgcaactagatgtaggtaagcgggattcagtgcggaagatgaatcaaaagctggttaaagaagttaagacgagcggagtgaaaacttacgtaactggtagtgatatcttaaatgatgatttctcggtagccattgaagagggtcttaaaaagactgaagttattgccatcgtcttcattttgattgtgctaattctagtcttccgttccccaattgttcctttaatttctttaggaactgttggactatctttcatcgttgctttatcagcagtgatgaatttagctaaatatacaggatttacgatttcaaactttacccaagttttcatggtcgttgttatgtttggaatcgggacagattacaatatcttactctataaccaattcaagaatgatttgattgaggggatggataaagaaactgccacgaagcattcacttaaggtggcaggaaaaacgattctttattcaggaagtaccgttctattaggattcttgactttagcattggctaagttctccatttaccgttcggcaacgggggttggaattggggttgctattttactactagcattattgaccgttaaccccttctttatgtcactactcgggaataaggtattctggcctagtcataattcaaaagaatcaaaccacagtaagttgtgggattggctttcaggacactcagctaaaaatccattgattgctttaggcatcatcgtaattttagcaattccaatgctgttaacttataacaataaacttaattatgatacagtcgttgaactaccagctaattattctgctaagcaaggatttaagacggtgcaaaagcactttagcaaaggaacggcggaacctactaccatctatatcaagagcaatcacaagcttgataatgaaagtgatttaagagttattgataacttaactaaccaaattaaaggtattgatggaatcaagacggttgcatcagttactcaaccaggtggcgataagttagatcagctttatgttaatgatcaattgaagacgttgacttcccaaacaagcaaggcccaagcgggcttaaaagaacttcaaaaaggtttaactggtggagattttgatgctagtcaacttgaagatatcggtgctaaagcgaccttaattgggcaagagttgaagagtatccaatcaactagtggtagctctgtaagtggtcaacaattgatgacggccttacaacaaaagatggcagcggctggtcaaccattatcacaaacacaaatgacgattctttctggagcagctagccaagaaatggcttcagtaagttcaatgcaaactcgccttcaagcaattgccacttatacccaagcaatcggtaatgatgctcaaactcttgggaatgaacttaagggacaacaacaaaaaatggcaaccgctggtggcagcgttggtaaactaaatgacgggctatctgaatccaatgattacttgaaagaacttcaagattcatctgcatctaacacattatttgtgcctaaagcagtgttagaaagtgatacatttaaagattcagaagatgtctacttatcttcaaataaaaaggccgctaagatcacggtggtcttagattcagatccattaactgctaagtcgattaaaaaagttgaaagtctgcaaacgatgattaacaacaacatcaagggaacttcattgaagaaagcttccgtttcgattggcggtcaaacttctgaaacttctgatacatcaagtattgctaatcaagatttcttacgtagtgcagtaattatgttagttggcattacgcttgcattgatgttagtaacgcgctctatcttacaaccattctatatcattgcttcattgctactagcatacgtaggtggactaggaattacacgctttattagtagtacattccttggtgaaaatctattaggatggaatgtacctttcttcacctttgtaatgttggttgcccttggagtagattacagtatcttcttgatgatgaagtaccgtgaatttggtaacgaggatgctggaggtcgaattgttaaatcagcaggaattattggaacggtggtaatttcagctgcaattatcctagggggaacatttgctgccttaattccagcaggagttctgaccttgacacaagttgctgttggggtaattagtggtctggttatactagtcttcttaattccagcaatgaatagtagtttaattcgtttaacttatccaagaaaaaattaatcataaagtcgtaactctatttggggttacggctttttatttgcttacgattaataactcgtttattctgggggtataaataattaggtgaggtgatgtttcatgaagattgggattattgcggcaagtggcaaagccggcgcattgattactaaagaagcagttcagcgtgggcacgaagtgaccgccatcgtccgtcatccagaccgagttaaaatggatgtttcaattttacaaaaagatttatttgatttgactacaactgatttagaaaatttcgatgtagtagttgatgcatttagagcggccgaaggaaaagaagaacaatttttgacatcaattgagcacttagtaaaaattttgacaggaacgtcagttaaattatttgtagtgggtggggcaggaagcctatacgtcgatgatcatattacccatctttatgaaactccgacatttccagaagtgtttaagcccacttcaatcatgatgggaagaggactagaagttttagagaatcagaatggattgaattggacttatattagtccagcggctgattttaaagctgatggtcccaagaagggacattacgttttaggaaatgaaatgctaatgagtgatgctaacggtaaaagcgaaattagttatgcggattatgcgattgctatgttagatgaaattgaaactggagaacataactgtgaacatttaagtgtagtttggtaaaaaaagatggaatcatgcccgattttaaacgaggtatgattccatctttttaattgttttctgaaattttaaatctttttgctaacatcgtattcgatgctgttttcagttttttggggatgacgatccttaacgtagaaaatagcgtactcctcatttttactaggattattaacaattactagatcatcgtcttgacgttgcttttgtttgtatagatgtcccttacgaacagcttcattataatcatggaagttaccaattgaatctccgggattaaataaaatggtttcactcattaagtccacctccttgttgtgctaccttaactatagcggatgttaacgctatcaacaaccgaaatggactctaatttaaggatttaatatatccaaaatttcttttttatagtgaatgaaatcggcagttagctcaaaatcggcctgtttacgtttagcagacgtaattttaatttcatggctgatggtagctggtttaccactcaggatataaatacgatcagataaagtaatggcttcatcaacgctatgggtaattagtaaggttgaattctgcatttgacgactaatatcggtgtaccactgataaattccacgtttggttaattcatctagagcactaaaaggttcgtctaaaagggttaagtccttagttgaaaggaaagttcttagcaaggctgcacgttgtttcattccaccagaaagttcatgggggtatttattttcataacccgttaagccaaagaattcaaaaagtggttcggcacgggcaatggctgcgctttttttaaaccctttgactaaatcaggcaagattacattattcataattgttcgaaaggggaggagcaagtctttttgcagcatgtagcctaggtgcccagcttgtccggtaatatcttcatcgttaaagacgatattgccagacttgggttgattaataccagctatgatgttaaatagggtggttttaccaatcccactgaccccgagaattgatacaatttcgtttggttttactgataaagaaacatcatggagaatttccttgtcaccgaaactttggttaatatgttgtacaagtaattctgtcattgtaattattcctcgataagttactgttttggtaagtattgattagtgaagccttgatttttagcgagtttttgttcaacaagtttatgatcattaagccacttgtaaaagttattccagcgcatagcgtcaatttttccaaattggccgtctttagttaagtagtatttagataagtaattttgactcttgtaaattaacttctgattactcttaagttctggaacggccttcattaataaatcagcagaagctttaggatttttagcggcatattgataaccttcggtggctgcagccatgaatgctttagcagcctttggattttgcttcaagaaactattgttcccaataatgagcggggtgtagtaatcaaacacaggattaatagatctaaaactaaagtaattaactggatagtttttaatttcggcgttaatacctgcccagccgtagaaaatccagattgcatcaacagccttggatttgagaccagcgacttcatcagtaatattgttagggaccgtttttaccttagaaaaatcaccaccatcatctttaaccacttgtttgatggttgctagttctgtaggagtattccaggttgcatagcgatagccttgcatttttttagggctagtgattccatcagccttacgcgacataattcctgaagtattatgttgaagaattgctcccatggcagtgaggggaaggggattctttttgccaattgcactagctaaagaatcttgaccagaaatcccaatttgagctttgccactagctacgatttgttcggcactatctttagaaggctgaacaaactttacttttagatgatgttttttgaagtagcctttttcttgggcaacatagaggcctgtatggttagtattgggcgtccaatctaaggcaaccgtaatggtttgagttttagccgctgaatttgattttccacaggcagtgagtaatagcgtaaaaataggtaaaaggacgattagactaaaaaattttttatgcttgagcatgattagttctcctccatggggtaataagatactgaatccagttaacaagtaaaattaaggccaaacttaaaattgaaattaaaaagattaccgcaaacattttgtcgtaagcataggccttcatgacacgtgtcatgtaaacccctaaaccattgaaaccgccgacccattctgaaactacggcgcctactaatgaatatgaaacggaaatttttaagctagcaaaaaatgaatcaattgcatcgggaaacttgatgtaaaaataaattttaggtgtattagcccctaaagtacgcatcaaggtaatgagatctttatcagttgaacgaaaagcatctagcatgccgactgcaatcggaaagaaagtagtagcaactactaaaactacttttggcaaaatgccataaccgaaccaaaggattaataaaggtgcaatcgcgacggtggggatggtttgagtaatcactagcaacgggtaaagcgctttataaatgggatgaaataaatccatgattaaggctaatccaactcctaaaagcactccaaagcatagtccccaaaatgcttcgatcagagtaactaatgagtttgaaaataaggcggaatagtcacttttaaaaacttctaaaaccgaaagtggggatggtaacaggaattcagggataatctggaagaaactaattgcttgccaaatggctaagattaataaaacagctacgataggtagaaaattaatgctggtatttgtcagttttttcatgaatgccaagaacctgtccttctggtttgtaattaatctttacataagacattacttgcggagcgccagcgtcagcagttattttagtaatattcttaacgatttccatcaattgatcatagtcgccctcaagggtggtttcaaaagcacctacttgataattaacaccggtagattttatatatttgatagcctggtcgacggcggcgactagcttcttttcgtcttccattataggaaggacttgaattgcgacacttgtgttcataaataaattcctccatttttaaaatttaggtacaaaaaaagccggcttaaaaagccagcttcaatgcatcttgtgttagaaaataatcattctaatattacaattgagtcttcctgcgctggcattatccatatcaggttcgagggtcaaaaaccatttagttttaatctcagccaggtaaagcccagcacccctgttacaaaatcagtatatcttaaattctaaataagtaaagagaaagttatttttaattttttaggataaatccttgcattttggtttagaccattttataattggactataccaaaaacgaaaaaggagatttgatcatgaaggttattattgttaaagataacgtagaaggcggaaaagaaggatacaaactatttgctgatgcaaagaaaaatggagcaacaacatttgggttagctactggtagtacaccgattaccacttatcaagaaattattaagagtgatctagattttacggactcaatctcaatcaatttagatgaatatgttggtttgccagaagatagtgaccaaagttatgattactttatgcacgaaaacctcttcaatgctaaaccattcaagcactcatacttaccaaatggtcgtgcagcagatcttgaagccgaagccaagcactatgaccaaattatcgaagataacccaattgatttacaaatccttggtatcggacgtaatggtcacattggttttaacgaaccaggtacacctgcagacagtacaactcacaaagtgtcactaactcaatcaacaattgatgctaacgctcgtttcttcgaacatgaagaagacgttccacgttatgctatttcaatgggacttgcttcaattatgaagagtaagcatattttgatcgaagcttacggcgaagacaaagctgatgcaatcaaaggtatgatcgaaggtcctgtcacaactgacttaccagctagtgttcttcaaaaccatgataacgttactgttattattgatgaagcagctgctagcaagctttcaaacaaataatttaaaatattcagcctaacataaagtctttgtgttaggcttttttttagtgcagtcaaaatgtaaaatttgttgatagttgaaaacgtttacgcaaagagatattatgaaatagtatgttggtgggatacttgaagctaaaacgtcacgcttaaaaaagtttttatgacattttaaaaccaaaatacattgaaatatcaataaataataatatttaaaaattctaacgatgaattttacaagcttacaaacggataatacgttacaataagctattattatgagagaaggagctatttaagttggaaaagacaattgcgatcaatgcgggaagctcaacccttaagtttaaattatttgaaatgccggaagaaagggttatttcatcaggaactgtcgatcggatcggtattccaggatcaaacttcacgattaagaccactgatggtaaaaaagttgaaattgaccaaccaattaaaaatcatgaagaagcagttaatttactcttaaaagagctattaaaattagatattattaaagattacagtgaaattaccggtgtaggacaccgagtagttgcgggtggagaaattttccaagattctgctttaattgatgacaaagtcttaaagcaaatcgaagacttaaaagaatatgcgcctttgcataatccagctaacgctacaggaatccgtgctttcaagaaggttttaccagatatcactagtgtggcagttttcgatacatctttccatgaaacgttacctgaaaaaaattatctttacagtattccttatgaatactatgaaaaatatggggctcgtaaatacggtgctcatggtactagtcatcaatatgtagcaggtcgtgcggctaagatgatgggcaagccattagaagaactaaaaattatcaccttacatttaggggctggtagttcaattacagctatcaaggacggaaaatcatttgatacatcaatgggctttacacctctagcagggattactatggcaacccgttctggtgatattgatgcctctttagtagtttacttaatgcaaaaacttaatattactaatccggaagacatcttaactattttgaataagaagtctggtttgctaggactatcaggaatgtcacctgatttgcgtgatataattgatgccgctgaaaaaggtgaacatcgtgcacaaatggccatcgatatttttgttaataatattgtgaaatacattggttcctatgcaactgaaatgggtggtttagatggaattgtatttacagcaggaattggtgaaaatagtgttccaatgcgtgaaaaaattacttctaaattaggaattttcaatgttaaacttgaccaagcgcttaatgaaaaacgtggagaacgtttcattagtgcggaagactcggctgtccaagtcatggtaattccaactgatgaagaattggcgattgctcgcgatgttgaaaagtttaagaaaatgggggactaactcatggatttatttgaaggtttgaagtcaaaaattaagggccaaaatagaacagttgtatttcccgaaggtgaagatgttcgagttttagctgccgctattcgattagctgatgatggcttagttcaatcaatcttactcggagtggaagctgatattaaagctactgctgaaaagcatggattaaaccttgaaaatgtgcaaattattggtccgagccaatatccggaagccgatcaaaaggaaatgattgataagttagttgaacgtcgtaagggtaaaaataccgaagaacaggttatcgaaatgctcaaagatgtaaattacttcggaactatgctagtttacttaggcaaggcggatgccatggtatctggagcagttcatgctactggtgatacagttcgccccgctcttcaaattatcaagactaaaccaggaatgcgtcgaattagtggagcatttattatgcaacgtgaaaatgaacgctatgtctttggggatgcagctattaatattgatcccgatgcagaaacattggctgaaattgcgattcaaagtgcagaaactgctcgcctatttgacattgaccctaaggttgcaatgttaagcttctcaactaaaggttcagcggctggaccaatggtagataaagttcgcgaagctactaaggttgcccaagaacgtgatccaaagaccccatatgatggtgaacttcagtttgatgcagcctttgttccagctgttggagcaagtaaggctccagattcagaaattgcaggacatgcgaatgtctttatcttccctgaacttcaatctggaaacattggttataagattgctcaacgtctaggcggttttgaagcaattggcccaatcttgcaaggacttaatgcaccggtttccgatttatctcgtggagctagtgaagaagatgtctataaagtagcaattattaccgcagctcaagtttagaaaataaaaataggaatcggaatttttccgactcctattttttttgtgcacattcagggcaatacccttcgacttcaatatgattggcaataatgtcgtatccagtttttttagcagcaatgcggtcgattttagctaaatcagatgcgtattcaggataatcaacatcaatgatttttccacagttaacgcaaattacgtggaaatgaggatggccatagtagtcgtaatgaattccatcttcactactagttaattcaatgactagaccttgatctaccagaagtttaagtgaattatatacagtggctaaacttaagctaggttctttggcgttgaccgctttaaaaatagtttccaccgttggatgatttcttttttcaatcaaatattccagtactaaccgacgttgaggagtaatccgtatatgattatcacgtaaatggtcaattgcttcatcaatagtctttttcatcatcctatttctcctatgtgttattaactaattgaaacactttttaagtttggtttcaatgtgccacaatcgaatttgaaaaaagttttcgttgcgcctttactttaccttttttaattaataaaattataattaagcttatttgaggagggcgtatacatgaataagattcgccaccagtttgatcaattggtgcaaggtgaatatcgtgaggccttcattctgattctaggaatgattgtgatgctgattggagagttttcaaccgcattggcagtcactaaaattgtggaagcatttggaaataatgaagttgtcgtacaactgacgaatattttacctttggcttggttagctttaatgtatccattgggcccagtttggttgcaaaaaaagtcagtcgttcagttgttaaagttatccttagctatttttatgattggttctttattagtagggatagcttttaatatgcctattttattactgggccggattattcaaaccacggggtgtggaattctattaccaatgcttccgagtttaattgcgacaattttaccagaaaaaaatgtgggtttaaccaaaatgagagatgttatgttaggagtagcgctagttttagccttatttctaaccggaatatcctttttattgggaaactggcaattaatcaatattttcttaattattttaagtctgatcatttaccacaatgcgtcaagtattaaaatcgatttagaaatcagtacatataatattgaacgggtaaacgtagttctttcgagtggttttatggtcctcattggttggatagttactttgggagatcaaatcacgagtagctggtttagctggggcttattggtgataggtattggtctaatcgcaacttatctgtggcgtgaattatctgtacccaatccgttgattgattttaaaggattattcaatgttcgatacttacgggctgtattactccaaggaatcggagatgcttccttagtagtattaatgattatcgggattttatatttgcgtcaaggattacattattcagtcattattattggattagccttgatgccatcgatcgtcgtgatgattttaatgcatcatgctaccaaacgatggtttaacaaattcgaatcggtcaataacgtcagaatggcgatgagcttaatgatggtgggatggggatgtctatccttattctcaacttacttaaacctaattttatttattgttttaactataataattgaagctgggcatggattgttaatgcaggtgggtcaagaactcagccaaaatcaaaaatcggcacgtttaaataacatggccgatatttttatggctcagttcaaattgatgtcctcaggcatgatattggcaattttgtcagttgttttgcagaatgtaaccaacagtcacactagtaacggattaccaggtaaattatcaaccctcgtgggataccgagctactttttcacttttctttgtgattacaattttaggttggattatcacgatgttggcaggcagaaacttaaacttaagcaaacatattgtaaaataattggggaattcaaatggattttaaagtagtttttagaaaaacaaaaacgtttttaagtgctttactgaagcggttcaacgattcggaagttgtaaataattcgattgttttagcgtattatttactactttcattttttccaatggtaatgttgatgggatcgttattaccattgtttgatatcaaagtgaacacggtgctagaatacattgaaacagtggtaccggtgacaatttacaacattaccgagcccattgttaaagattttctggggagtggaaatggcgagttactatcgttcagtttattgttgacaatctattcagctagccaagctgtggctgcttttcaacggacaattaatcgggcttatgatgtagctaaacatcaaaatcccattgttaatcggattgtcgcgtttgttttgaccgtaataatcattgctattatggggattttggtattcctctttagttttggacaaacgttgattagttatttaactccaattctgaatttaccaacgcatctgtttgatttgatcggtcagttgaaatggcctgtaactatcgtgggcttattcgttggattagcgttgttatactacttggtgcctaatgctaaaatcaaatttaagtacgttattccaggatcaattgccgcaaccattggaacaatgattatctcgcaatttttctcattctacttacgaatttttgcccgttcagtaaccagttataagactttgggaacctttattgcgattatgttctggctaaatttctcggcaatggtagttatgtttggtggagttttgaacgctacctggcaagagctacgtgaaggaaagattgtggaaacctccggcagtcttagaaaagtagctggtaagtataaaattaaaattaaaaaataaaagttatccaacagtggaattaaccgctgtggataacttttttatttttctgaataaaccacttcaaaaacttcggaaaccaccggcttatcctctgtaaattgagtatcatatttttgcatgagtttagtaaatttagctaacgaacgtgcccgccaatcttcaatcgataagtcgccttcaccctcattataggcgtgctcacctgagattcgaaggaaaggtactaattccgagacgaccgtctggatgattgcgattggtttcatgtcaccatttaaaaggatgaaataatcaccaacctgaggaacggcctcttgttctgctgaataataggcaagtggtttcgaggtagaacgtttcttaccacttaaaatcaaagcgttaagacggttaatttcgtctggttgatcttgaggaccaaaccaccgtgtctggtaagttttaccttcaattttattttttgtagtaaaatcatgccacattttttctgctggagttgtcataatatcattcctttcgaatgtaattaacttattttaacattgtgaaaacgtttacgcaaaaactgtggaattatgctattctaagtaaatttgacgtaagtcagctaaatcttgatctgaaaattcgagtgcttccttgaaataatgatcaaatgaaccaaaacgatcaagaattaaatcatgggtatgatcgagactggaagcagtcactgagaatacactattcattttttggataagtttatcaacatgtttaccagtaatttggcggcgaagctcatcgggatcttgattgctgtataccaaattagttagaaggtagtcttcacgaatagtttggtaggggacctgaagggctgaaagaatcagcataccggccatgcctgttcgatctttaccagctgcacagtggaaaagtaatgattctttttcgttggtattagctaataaatcgacaaacatctggtgaaaagcaatccgcgagtgttcactaaaggccattgttaggtatggatcatataaggactgttcataagcttgatattttaaatgtttattttggggtaaatcagatttttcgttatcttggataggataaactggataaaaacgatagatagtttgggctgggattttatcggaactccaggacgcttcagctggcgagcgaaggtcgatatcatatttgagtccataatcagccaatagggcctgagtgcgaggagttaaatgactcagctcacctgaacggagcaatttttgccatttaatagtctgattaaatttagtttgataaccacccagctcacgaaagtttactgcaccaggtacatctaaaatacgttccggtttcataagaaagaaaacctccctttattaatatcattaccattatagtctgatttaattccattcggaaaataaaaaatttaaaggtaagtaaaaagacgccaattaaggcgtctttttggggagtaggttgttgaaaactaaattctgtactttttggaggagtaatcagaataaaagtttaacgaatgaggaaatttctttcctcatccatgtaaatcatattaaagcataaatgtgaattttttgttaacgaagtgtattgaaagtaacaaactttgttaagttagttttaaaatatctttattctaagtaaattttacgcaaatcggtaatatcttgttcagttagctttagatactctcttaaataattatccatagatccagaaagtctacgaatttcatccatggcggaattataataagaaatatttacagattgaagagctttaacactttgaataaaggcggagtttttatttttgagtttaagatccatcacaacaccattttgataagctttagtagcgcgattagttaagagatagtcagcacgaatagtgtcttcatctacgtttaaagcacttaatagaaagattgctcccatgcctgttcggtctttaccagccgtgcaatggaaaagtagcgcagaatcatcagcactattagcaagcagcgcatcaaaaaacttgcgataagccttttgagaatgtctttggcgaattacatcccgataaacacggcgcatttcgactaatccactagtaggatcgctattcattttacgctgaagttcatcagtttgttttgtgctttgagtttcatcaactcgaaaaacaggagcaaaaacatattcagcgcctgaagggacacgatcaggaaatttacttttttcttcgggagaacggaaatcgacgtcaaatttaacgttgtaatcttctaaaaggcgtatatctgcatcagctagacctcctagttttccagaacgaatcaacttattccacttgatagttttaccatctaaatttgtatatccgcctagttcacgaaaattcaatccggatgaaataggtaaaagtcttggttttgtcatacaatctcctcgctttaaatattatttttaactcggttggccatgttgtcataaatccgtttacaatcgctgctattacctcgtaattcgtagtcatcaatcatttcaaagccgtaatcttgggcatagcgacgagctgttaaacagtattgttcgttaaagttacgatttccactaccaattacacctaagcaaaattttcggttatcatggtaagcaatatattcgccgagcgtattggtcatcagttctttaacgccattatcaataccatttccaccgtcaagataagtaggaacgaaggcaaaatatggttgagtttcatctgcaaaatcagtttgatcggtaacttctttgctaataattaaaggattactagtatcattttgatgcatcttttcagcataatctgtcagatcatctacaaatgactgggtattcccagcaactgatatatatataatgtaaatctgattttccatgttaaaaactccctgtctagaatttacttcaaaaaacattttacgcccctcttacctaaaatgataccacggtaaagttgcaaactcataatgttatgcaaaagtaagatgtgatatggaaacggtaacaaaaagtagtacaatgatagttaataatgtaaggggtgaagaatttggagccatatcttgtgtttatggatattgatggaaccttaatcgataaccatcagaacgttttaccggagacgaagagaaccatcgaaaaattacaacaacgcggtgtaattttctatattgcgacgggacggatgctttcgctagctgaactaatccgcaataaaatcaacgatcaagttgaaattatagcttcaaatggatctgtatatcaaaaaggacatcattttcataaagagcatttaggatggaatgcacttaaggaaatctataatataacgtcagaactaggtctttcgactaactttttcacaacagatatgacgtattacacacacgaaaagccgtggatgttgagtcgtttagctcgagttcgagttatggctgataagactggtaaccgacgttttgagaaagttagagacctggaacatttacaccaacttagtagtcaaattatcaatgggattaccattgataagaccaagtcggaacggctagatgaagcgcgtgaaaaaatggaggcaactgggttacttaaggtatcgtcgtcttcaccaaacaacttggaattaattcctaggcgaatttcaaaagcaactgctgtacgggcaattatggataaatatggcatcccgcttgaacgcacaattgcttttggaaatgacatgaatgacctagaaatgattaaagccgttggcacgggggttgcgatggggaatagtcctcaaatcctaaaaaacgaagccgatgcggttacggatagtaatgtggaaaacgggattgggaattttttggagtcatattttaaaatataaaaaaggaagtagcctttaaaggactacttccctttttatttaatcaaacaaagtctcggttatcgcgacaacaggagggacatcagcgagttcctcaggttttagtttgtgaactaagaaccaatcaatatgggcattttcattatcgagaacttcgaaatcataattttgaattcggacgtgttcaccaactttgatatctggtttgtgatcaataacgtagccaccaagagtaacgacgtcttcctcttcaaaatctggaacatcaatgccaaagtaacgttcaaaatcataaacggtcattttaccgctaactttataatgtccattttcttctttatgaatatagtcaccagaaacgtcatcgatttcatcattgatgttgccgaagacttcttcgtaaatatccttatcagtgataattccactggttccaccatattcatccacaacgactgaaattggtacctgtttttgaatcatttgttctaaaacatcttgtaaagcgagcgtttcaggaacggtaatgatattacggagtagtttgctaactttgatatcgccatcaacttggctttgacgaataatatcgtaattgtaaatatagccaagaattttatctttatcattattggctaccactgggaaacgactgaaacggctttgaagatactgacgtagagcttcatcaactttactattaatatctaagacaaccagttgcgtacggtcaatcatgatatctttagcgactttatcattaaaatcaaaagcccgttgcatgtaaacataatcatttttatccaattcaccgccactaacggcatttcgagaaagatttaaaatttctgcttgagagaatatttcgtcactttcatcggcgggttgcatccctagcaaacggacaattccattggccgaagcattaagcaaccaaacgaatggataaaaggtggtatggaaataatggaggggtgttacgacccacattaaaacttttagtggaatatcgatactaatattctttggaacaatttctgtaataaccacttctaagtaagttaacaatagaaccccaacaactgctcccacaatatgcagagaagctgagttaattaggtgagttgctccaaaaacttcaacaacaaaatattcaacggttgattcaccaatccaacctaagataataccacagatcgaagtacctacctgagtggtggataaatattcgttaagtttacgaaccatccgcatcgccagttgatatttcttctttttacgagcacttgttgtttctttttcagcctcttctaaggcactgagccgtgtttgcactaaagcaaattctgccgcaacaaaaaagtaagctaatataaaagtaattagcatcacaatcaggttagagactatctgaccgctatccaaaaataattccccatttcttttttctagttattgttacattatacaacgagaattttaaaaatagtatgaaaagtagctttctttttaatgttgtatagtgaagtttaatgttatcatgaagctataatttattatatagtggatggaggttcttgtactatgaaaaagattaacattggtggtatgcgcgtttctaacgttgctttaggtatcatgcgaatgaatgcgctatcagataaagacgcagcaacggccattgaggctgcttttgatataggaattaattatattgattcagctgatatttatggacatggtgaatccagcaaaaaattccgtgaaggactaaaactgtcgagtgtaagtcgtgaggatttgtacattcaatctaagggtggaattgaaaatagtaatagtggcgacatcccttatggcaatcgctataactttagtaaagagcacatcattggtgcggtcgacggcgaacttcagcgtttaggtgtggactatctagatgcctttttgcttcatcgacctgatccactaatggaaccagcacaaatcgcagaagcttttgatgaacttcaagctgctggtaaagtacgtcattttggggtttctaattttaatccaatgcaggttgaattagttcaaaagtacactaagcaaaaacttgaaattaatcagcttcaatttggaattatgcatacaggaatgattgattttggcatgcatactaacatgttcgacgaacgtagtattgatcatgatggccagattttggaatacgcaagattacacgatatgacaattcaagcttggtcaccttaccaatatggtttctttgatggtgtatttatcgataatcctaaattcccagaattaaataagaagatgaaacaaattgcagatatttatggtgtaactaagaatgccattgcaactgcgtggattttgagagatcctgcgcaattccaagtattattaggaaccatgaatcctcagcatattaaagaatcagctgctggtagtgatgtcgaacttactggtcaagaatggtatgacatttactatgctgctggaaatgacatgccttaaactaaaaatagtaacgtcccttactttatagtgaggtgcgttactattttttatttcttttgaatggctactcgtaaaattgttttacgctgggcttcttcaacacgccgaaaatcactcatatagatttcggtatgttctttttcgctgcgtacgtacccaccttcatcgataaattgctctaatttggcgaaactttcaggttcatcgtcgaacgcaccgacatgtaaaacctgcgctactaattgttctggttgatggtcgaaaaagacttggtcaaataaatcagcatcgattttagattttgcccgaactaacgcttctgcagcaattgcatcagtcacaaaatcaggttgtttaatactgattgtatatgcgaaatgttctttttgcatgactggcccatctaaatattgaggttgaattccccaatgtccttggagcggataaacggtgtataacttaaagttaggaatatcccaatcatttttttgactcatgcgaattgtataggataaaggataaagtgtttgaactcgcttctgaaaatcgggtaaattgggatcaccgttacctttgatactaaaataattttgagcagggatggttaaaatttgaggcttttttctaagtgaaaagccagcttcttctttacgccattcgattttttcgtccgtcataagaatgcctcgtgaattgcttagttgagtgttttgttagcgtcactgattttcattgtgatatttttagggtgatcttgaaccaccacaatggttcccttacctaagaaatctttttctccagtatatttgacggtatattctttagcgactgccccagaattttgaagtcccatgacgtatatttcttcatccgtagagtcatcactaaaaacgaatgcgatggcgggagtaacgacaatttggtccttcttcatttgacgtagggtatcccataaaccattgatgacttcgattggaaacattgcttttacttcttcagatacttttctttttttagttggatcaaacattaaattttcctccgtttttatgcatgtaaatagagtaccataaatgctaatttttgataaacaattctatgaatcgaggttaactagtttttaaaactagatgaagatgttataatgatagtaaataagtaaaggagcactagttatgagtgattataaagaataccaaagatggcttgaattagtacgattaattgaattaccccattgggatgatttgcctaattttgatctttatatggatcaagtagtggcattaatgaccgaatacacgggtcctttgggacttgaagcagtgactccggcgatggttaataattatgttaaaaataaggtaattgtcgctcccactaagaagaaatatcaagttatgcaaattgctgatatcttgttaattacacttttaaaacaatctttttccattcaagaaatccgttcaggaattgatcgggtgactgctagtgagtatcccaaacaagcctacgatcgcttcattgatttagttaataataaaatcaagcatatgggactatcacgtccagaccgtaatgccaacaatctaacagatcaacttttagaagcagcttccaacatgattattgatcaattagaaactaatcaattagttaaagtggttaaagattcgaaaaaacatcaaccgactaagattaaataaaaaaagaggatctacgatttatttgtcgtaggttctcttttttactattcaataatgtcaccgaaagtcccgtgaactagttgagctaaatcctccgcctttaattgaacagatcgaccaatttttcctgaagatacgatgattgtgccttgttctttggcaacatctgaaatgtaaataggaaagtgcttagtttcataaattccaataggagtattagccccatgttcgtaacccgtggttgcaattaaatcctttaatggaatcataccaacttttttattacccgaaattttagcaagttttttgtaacttagatgttcatcaactggtaaaactccaacaatggggccagttttatttccaattaatgctaaagttttataaatgaggtgatcatcaacaccgatgtaatcaacgtttaattgcttaacatcaccatcttgaaatgtcggaaaaataaattgcttgtattcaattttgtttttgtctaaaatctgttcaacaagggttttagagactttttctttcttctttttccccatgatctcaccacctatctttgtattttagcatagggaaaatcgttagttaataaaatcaaagcattcaagtttgctataatggtgaaagcaattaacaatgggagatagtttaatggaagatctgatctacaaaaaaatcattcacgaccttaaaaaaagaatctttaataatgaatttccaacgatgcgtttaccagatgaacgttcgttaactacggaatatgacgtgagtcgtagttccgtcaaaagagcattaagttccatggcacatgagggaatagtttttaaaaaacgaggttccggaacttttatcaatccactctatttgaaaagtcaatcctcttttaattatgaaggatctaatctaggtatcacagatagtttgaaatccaatggtaaaaagcagggaattaaagtgctagatttttcagtagttcctgctacggaaaatatgaagacagatttatttttaaatgaaggtgactttgtctatcaagttcgtcgcttacgtttgttagatgatgaaccaatcatgattgaaacgggctatattccaattaaaattgtgccggagttatccaaggccattgtggaaaaatcgatttttaattatttagaggacgctcaaggccaacacgtaacacgttcgtttatgtcgattcaagtagaaccctccaatgctgaagatcaaaaacttttaggattaaccgaaaatgaacccgtcggtgttatgtccggaattttctttatggatgatggtacgccgtttgaaatttcaaatatgcgaattcactacaaatatatgaattacagcacatttgtgtctgtcgattaagcaaagcatctaattttgattagatgcttttttacgttaaaatagccgttgaaaaggtgacttcgtatcatttttaaaattggaccgtatcaatttaaaaaatgattgaccttttttgagaaagcggttataataaattcataaattaaaaacaacctatttttcgctcacgaaaggaagagtacaatgacagattattcatcaaaagaatattttgacaagcttgaaaaattttggcgtgctgctaactatctttcagtaggacaattatatttaaaagacaatccgctattaaaacgcgacattaaaccagaagatgtaaaagttcatccaattggacactggggaacaattcctggacaaaactacatctatgctcatttaaaccgtgttatcaacaaatacggtgtaaacatgttttatgttgaaggaccaggtcatggtggccaagttatggtatctaactcataccttgatggttcatacactgaagcatacccagctatcactcaagatgaagaaggtatgaagaaactcttcaaacaattctcatggcccggtggggttgcttcacatgctgctcctgtaacaccaggttcaattcatgaaggtggggaacttggttactcattatcacatggtgttggtgctatcttagataacccagaccaaatcgctgctgttgtagttggtgatggtgaagctgaaacaggtcctttggctgcttcatggcaacataaccgtttcatcaaccctattactgatggtgctgttcttcctattttggatattaacggctataagttaagtaacccttcacttacatcacgtatgtcagatgaagaattaactgaattcttccatggtcaacattgggacccatactttgttgaaggtgatgattcagaagctatggatcctaagatggctgaagtaatggacaaggctatcgaaaagattcaagaaattcaaaagaatgctcgtgaaaaccacgatgaaactatgccatactggccagtaatcgtattccgttcacctaagggttggacaggtccaaagacttgggataacaaggttattgaaggtacattccgtgctcatcaaattccaatcccagtagaccaaaagaaccttgaacatgttgatgctttgattgactggatgaagtcatacaagccagaagaactatttgatgaaaatggtcgcgtattacctgaaattgcagaaattgcacctaagggtgaaaaacgtatggcatctaacccaatcacaaacggtggagttaacccaactgacttgaacttgccagattatcgtgactacgctgttgatacaacaaaacgtggacaaaacatcaaacaagatatgttggtatggtcagactacttacgcgatgttataactaagaacccaactaacttcagaatgtttggtcctgatgaaacaatgtcaaaccgtctatatggtttgtttgaagttacaaatcgtcaatttgttgctccaatcaagaaggactgggatgaagctcttgctcctgaaggtcgtattcttgatgctcaactttcagaacattcagctgaaggttggctagaaacatacacattgactggtcgtcatggtatctttactagttacgaagcattcctacgcgttgtggattcaatgattacacaacacttcaagtggttacgtaaggctgatgaattagattggcgtaatgattatccatcattgaaccttgtatctacatcaactagtttccaacaagatcacaatggttacactcaccaagatccaggtcttttgactcacttggctgaaaagaaaccagaattcattcgtgaatacttgccagctgatgcaaactcattgcttgctattagcccactagttatgaacgatcgtaacaagatcaacttgattattgcttctaagcaacctcgtcctcaattctactcaatggaagaagcagaagttcttgctaagaacggtttgggtattattgactgggcaagcacaactaatggtgaagaaccagacgttgtcttcgctgctgctggtacagaaccaaatatggaaagtttagctgcaatcaacatcttgcatgataacttcccagacttgaagattcgtttcatcaacgttgttgacttattgaaacttcaaagtcctaaggttaaccctaatggtctaagtgatgaagaatttgatcgttactttactaaggacaaaccggttatctttactttccatggtttcgaagacttaattcgttcaatcttctttgaccgtcataaccataacttacacgttcatggttaccgtgaagaaggggacattacaactccattcgacatgcgagttcttaacgaactagatcgtttccacttagcacaagacacaatcaattctattccagaatttgctgaaaagggtgcagacttctctcaacaaatggataacacacttgaacgtcattaccaatacattcgtgataacggtgatgatcttccagaagttactaactggacttggaaagatgttaactaattaaatcaaaacaaaaaagctgaaagctttgccaatagggcatagcttccagcttttttatttagttaaaaaattaaaataatcgggtataggagcagtgacttctattgtttctagattaaatggaagtggaaaacgaattttccaagaatgtaataacattggctgctgggtattatccagattatataaaggatcgccaataatagggtgacccagatatgaaaggtgaacgcgaatttggtgggttcgaccggtttctaaatctacttgtataagactgctattttcatactgagctagcacttgatagtgggtaatagcagataagggatttaaaccattaatttggcgtttacgtttatcatcggggtcaaaaccaattggaacattaatggtgcccttagattgctctaaatggccgctaacaacgcataaataggtgcgattaatgactttagtactaatttggcgattaagaataggcacgaccactggatttttagcaactaacaaagcgccactcgtgaactgatctaaccggtggacattatatgcttcgttttcggtgtccttgaagtaagcttgtaagaaattcatcatgcttcccaattcatgaggttgattagcatgagttttaacgcctgtaggtttattaacgaccattaagtccgaattttcataaagaataattggcacttgcgtaaaatctggatcaaacggcggaaggggggtgtcaaaatcagacgattcaaaattaagctcaattaagtcgccaccttggacgatggtgttgacgggaacatattttccattaaccaaaacgcgttcgttaatccgtaaaaagtggacaattttccgcgataataaccaagttctttgcagtaattctcgtaaactctgagggtggtataaactggaaagtctaatagcatggtgccattgcataatgaaactccttaacgaaataaaagaatcgactcaacaaaatgttcaatcgatcctttaagtatatggtattaatgataattatttcttttctggtttaacaatcaatacatcgcaaatcgcgttacggctaacgtaagttgcaacagaaccaaccattaaacgttccaaagcattaagtcctgttgaaccaatcataatcaattcgtttttatggtcagctggaaattcgcgtgcaataactggttttggattcccaaaacgaatgtgaacactaacatctttaactccagcgtcctcagcttttttcttgagttcttctaatcgatgttggacgtcctctgaaagtttatagattacatctccactaactgccccaccataagtatcactaaattggtttacttcaaggacatttaaaatatcgagatgagtgtcatttctttttgcaacttcaattgcgcgatctagaacaacatcagttgttttagacccatcaacaggtgctaagatatttttgtattgttgtagcatgttacccaccatccaatcatcttttcttatactaatgatatcattttcacaaaaaaatgtaagcctttttacatcgaatttaccggataaactaaaatatttctaattagacggcaaatgcgttaaaatgaacttgcgcaaattaaatggcgactacggccgccattaagcactctgcttctccatggagactgaatgcaagggctcgtggtaattactgcgagtcttttttatttccaccagagtttaatcaaagcctgggttccatcgtcgcctaatccctgttggttaactaaattatcataaagttgagtggccagacgcgtggcaggtaaatcaacttgcatttgcttagcttgatcaagtgcaatttttaaatctttaaggaaatgcttagcgaaaaatcccggagtatagtcattttttaaaattcgtggaacgtagttttccatactccaatttgatgcaccgccattggataaagtttcgagaactgtctttaagtcaagccgggcagctttagcgtataccaacatttcagttaagccagtcatggtcccggcaatcatgatttgattagccatcttagcattttgaccggcgccataagtaccaaaatagttagttgcatgtccaatttgaccaaagattggtttcatggtttcgaatgctgtctggttaccaccgaccataattgttaaagtagcattttgggcgccaatgtcgccaccagaaacaggagcatctaaggccataacagctagttcatcagcttttttaccaattttttcggctaatatgggcgaactagttgtcatatcaattaaaatttgtccggaagtaactgttgaaaaaatcccgtgatcaccaaagtaaacttcttccacatcttgtggaaaaccaaccatggtaataactgtttccacttgttgagttagctcggcgggagaagatgcccactgggctccttcttcaagtaaagggtctgctttagatttagtgcgagtaaaaacagcgacatcgtgaccattttttaataaattatggataatgccacttcccattactccggttccaataaagccaattttcataattaaaacctccgtatctgaatttttacttaattatagtgatattggagtgcgatacgcaatatatctatgtaaaaaagggcttttagatgttaaactcatagttagaaaacaaaaaaacgagggacaaaatgaaagtattagcaagtgaagttatccaaacattgaaagatgccagttttaaatcagaggaatttaaaattgggaaaacaactttaaaaaaagccgacggtacaggatttaaacctgctttagattttttgaaacaggccattcaagaaagcccaattgctgaagcaattattaatgttaataaaagtgtggttattaaaattcaatctaatattattaatttaccattgctttatcccggccctgtggagaaactaactgaagcagaaaaagaatatgatgttaatatttatgcagtaattgaagcagaaaaaattaattcgtctcatttacgaattgatcaaattgggacggcagaagatctaattagtactaatcctgatttacaagctaattttaaggattggatggcggaacaatttgatcgattagatcacccagataaggatcaaaaagataatgaggaataaaataggaggttcctatgaagagatttgaactaatagttggaacagcaatcgtaattgcattctctacattaatcctctccatctacactcatcatcagcaagtaattcagcaagaaaaagtggagttacaaaaatcagccaaaaagaaatcactacctaagagcacttctaaagatagtgggttagctggagatgaaattcaagctgcaaccacaaaatcaaaaaagggcgaaatgaacccaattaattggaaaaagtcttctgaaaacaaagcttatccagatttagataaatatccgaaagctttcttgaaggtatcgattgctaaacaacgagtgtatgtgatgaacggggaaaaagttttatatactatgtacgcgtcgactggatcacatgaaagtccaaccccaacagggacctataaaattcaggccgagcggggcgacttcttctataatccaacttcaaaggaaggcgctaagtactgggtatcctttaaagatcatggaatctatctgttccatactgttccaaccgataaaaacggaaaattccttgaggatgaagctgaacagttaggtaaagaagctcaatcacatggttgtgtgcgtttggcggttccagatgcaaaatggatttacgaaaaagtaccggagggtatgaaagttgaaatacattaggattgttcaaacatggttgttgaaaaagcgtcattttaaagacgaaattttatggggaattggcatcttagtggggttgttactaatatttaaaattttgggaagattaatattaggaaccaccttaattagttttagtgcactactatgggcgttactgctctatttagtggtcctttttgtaatccggtttgttgaaataaaactgcgaaggtagctacgatagttaagatttaattttgaggtctaatcgaaactaaatctttttttatatgattaaataaaaactctagcaaagttagattttggtagctaactttgctagagtttttaagctttttcctctgggcggttttttaatttgcgccaaataatttggaaaatagcaggaataataattaatagtaagaatatcaaagtaaaatactgcttgataaaaggggtttggccaaagaaataacccgaaaaacaacaaattccaacccataataagacaccgatgaaatttaatttattaaattgatgccaatccatttgggtggtcccggctacaattggaataaaaagaccgacaaagggaataaaacgagaaaatattagtgattttttagcattttcatcgaaaacttcctgagtttggttcattttttcggaatcactaatacgtttagcaattttgtttttagatttaatattcactccataacggtatttaacgatggcaccgctagtagctgcaatgataaaagtaatcgttaggataaaaatgttaagccgtgaattagctgcggaagcaatagttccagttaggaaaagtaccgattgacctggtaaaaatgaaaatacgataaaagctgtttccagaaaaatccagataaataaaatcaggtagacccagttatgaaggtgttcggttaaaggtgttatatatgttaaaggatgaatcacaaatccgagtatgagatcaaacatttatccacctcgctttcttttttctttattaatgataaagacttatttgctagattgcaattacagcgcctaatcggtgttgtatgttaatagatttcatgttacattagatacatgcgatgagtcgagataggtcagacaattctttgaattgtttcgctgcggcgactagtgaccatttcgccggcacacgttatctaccgtattgtagaagtgtgagtcataataggtgtgtgagccacctaacgactgcgttaacttcgttaatgaccggtaaaagaggatggacaattaattttgtccatcctctttttttgtctatttaattaagtaaagttggtcgtgaattaaatcaaatgattgataatgttggttaagttgctgggtattttcaggttcaattaatttagcggttttccaaaaaccagcactattggtggcgccatgaggttcgccaatgcaaattaaggtaggctgcttagttagcgagcgtagcttttcgagaatttgaacatcgattggaactccatctggagaccaggacatgattacaaaatcaacttgattaccatatttttcaattgctgatatagcatccagtttttcaacttcggtgacgagatgtttacctgtttcattttcttgaacccagtctaatgaatctgtggcataaacgttttgctgttttaagcgtaatccatgactgatgtaaccattaccagccataacttctagagtaggtctatcagccaaataatgagctaaatcgctaatgaacggggctgaaatatacgcccacataccgtaggtttcttcaaggtagtcgcgataggagcgcaaaagtttgtccaatttagggagctcggctgtcaatttttcccacaattggtcacctctaggatcacctaggggatattgatccttaatttgattaaaaatttgatcttgaatatcttcgggtaattctagtaccggtaattgctgaggtaagagcttttgttgaatcagacgattactttcaaggatctgattaattaaaaaggtaatcgtgctattttgtttaaaaagctcacgatagcgctcaaggcgagtaatatagttgttagttgttgaaacggggcgttccttttttaattgacgttttagtttttttaattttttaggattcattaagattcgtcctttgttttattccaattcaaagcgagttcttcttgttcaccggaagggcttagcgtacgacgttttttaccatggaaataaccatccattaattggaaaatttcatagcgatcgtcgctactaaggaccttatgatcaaagctcaattggcgacccgataggaataatttacttaaatcatattcattcaaggcagcacgaccacaaaggtaatccatactaacatcgaaatattctgcaagtttttttacttccaagtatgagggagttcgaataccacgttcccaatttccaatctggctggatgtattgggagtttcatctggaaaaagttcgttcaagcccttggcaagaacttctaaagtaatgtgttttccgtgccttaaagcacgtaagcgttctggaaacatgtgctatcctcctgtgacaatctgtctatactcattttaatacagaatgggggaatgcgacaaattaaagtaagtgtcacaaacgaggattgatttggcgcccggaaattatgatgggttgatacaacctttttgtaagaaataaaactaataaagacgcgtactaaaaataaaaatcaaacctaacggctgataaatttattatgaaattaaactattttttaaacgttaaggagaatttgttatccacaaatttgataatccgtatatactaaataagttagttctaggaggaaagtacgatgaagaaattatggaaatggttgttaataataatcggagtattattggttattgatattggagcaggaatgtatttcttccacgtagctgaagtacggggacccaaaagttttatttcaagtgaaaaaacacttaagaatgatccattaagaaaacaaaaagaatggtatcaaaacgtaaaaaaagagcaatggacaatgacttcggcaaccggaaatttgaagttaaaagcttattatatcccggctgaacatcagactaataagacggtagtaatggcacatggatttttacaaagtaaagaagctgaaggtgctccggcagctatgtttcatgaactagggtacaatgtattagctccagatgaccgtgctcatggagaaagcgaaggcaaactaatcggttacggttggaccgaccgacgcgattacattaagtggatgaacaaacttttgaagaccaagggtaaaaatcagcaaatcgtcatgtacggggttagcatgggaggcgctacgactatgatggttagtggagaagctgatgtacctaagcaagttaaagcttacgtcgaagattgtggttatactagcgttgatgatgaaattacatatcaagctaaatcaatgtatcatttaccaaagtatccgctagttccaacagttagtttgatttctaaaattcgtgcaggttacgactattctgaagccagcgccttgaagcaattggctaaaaataaaaaaccaatgttgtttattcatggttctaacgataccttcgttcctacttcaatgctagagcccctctacaatgcaaccaaaggaccaaaggaaaagtatgtggtcaaaggtgctaaacatgctgaagcaatgaatactaactataaaaaatataaacaaatagttgaaaaatttttagataaatatatggattaaaaaaactatggtagcaggttgcctctgacactaagcagtgcaaggtgacttgttatcatagtttttttatgcgtaaatactatcattttgcatataaacccactcgtcattggagacctgttcatatagcaaactggccagttcacgagaaatatttttctttcctaattgttcttgaataaagttatattcattttggaaggcgttaataaaaagttcttcctgaatttcgttagcacgagtgttattttgaaaacgacgatggcgttcacgatagtactcttcaatccagtggatttctgctcgattgtctgcgtttagatgttctctgagataagcaaaaatctgaggcgatatttcattttctacttgagctaattcgtctcgagcattattgaattttttggtaaccaccaaaggatctacccgtttaatgcgtcgtttgaaacgatggcttaatttaataaagtaaaaacgtgctcgatacatgaagtgctggataaacgattgatggagttggaaactttggaacaatgacattctttcgtaaaaagtttgttgtttaacgctaatttcaccattatccaccatctcttgaagtagtttctcttctaaattaaaacatttctgtaaaattttgtaagtagcgtttcgtttaggacgttgtaagatagactgttggcttcttaaagtagcaatcaccgcctgcgtttcgactggatcttcatcggcatcatggacgcgtttaatggcgtattcaatcattttttggcggtaggtgctaatatcttctaaactgtaggaataagttttggctggtaacatcaacggtaagataatacttggcacgagtaagctgagaatgatgacggttgccgcgatgaaaataatatcattgcggaatggaaaaatcttaccatgtaatacaattggaatagaaaaggccatcgatagggtaatagtcccatgaataccattaatagcaattaaaaaatgattaagtactttatcggctggccggatacggatgttggctagttttaaagtaacccataggtagcgaatgataatcatgacgatgtacaaaatgataccaaccaaaatgagataacctagcgaagaaacctgacggccttcattagtaatatcgtagatgacggttggaaatgaaactcctagaagaataaaaacgaaaccgttcattaagttagtaaaaatttcgtaggtggttttagacaccatttgagttttggttgaagtgagacgcaaggattgagcttgagtactttgaatcaatccagctgctaccacagccaaaattccggaagtatcaaacatttcagctagaaggtagatagcaaaaggcttaatgaagttgatggggacaataatgttggggttatcaatatcggtttcaattaagagtaattgtaagcgaacaaaaagccaaccgacaatccagccgacaattaagccaccaaagaagacatataggtaattaaaaatacttagaaccggagaaaaatgtcccgtatgaaaggcagttaaagctaaatcaaacattacgattccacttgcatcgttaaacaaagactcatttttgagactcagcatggcctcattaggaagatctagattttcggtcacggatgacactgcaaccgcatcggtaggggtaataatagcagctaaagcaaaggcaagggcaatcgggatatgaggtaataaagcatatcctaagtaaccaactagaataatcgtgacaacggctagtccaatggctagagaaaaggtattactcagagtacgtttaagtttgacaatgttagtgttcatcccgtcgtaaaacataagcggcgcaataattgctagcatgaaaacttcagggttaagattgaaatgattgaaattggggatgaaagaaagtgctaaccccatcataatttgaataatagcccgtggtaaaaatttgattttagtatctaatgcgtttgaaaaaacggtggcgatgattaaaatcaaaacgaaaaatacaatggacatgcacaacgactccttttttggtttctctaaatcaagcgtaccaaaaagccacaaaaaaatcgatttttgtggctttggtatagaagatattaatttttagcaaataatttagtgagataatccataaagcgcttgagataaaagtctgcatcgacattcaaagctacggaaacgttgggattttcttcgtttaaacggccggggtcaccaatggtacgaccccacatttcgtcagttgtatcaacgaacatgtttaaatccatagttttggaaaatgaagcatcaagggcaattcctaccgccaaaggatcatgcaaggcgcaaccgccaagatgaggactggtaattttgtaaacgtcgatatagtaatcaacgatatcagcaaatttactaccagcagtagtatctaggtcacgccaaagttgcgtttctttttttgttagtaacgttcttaaagtgacatctagaccaaccatggttaagttaacgtggctagtaaatacgtcattagcagcatgagggtcttggttgatgttagcttccgcaactggactaacatttccagggacagtaagagcaccacccataatagttacgttgccaattaaatcggcgacttctggatctttcttaaaggcaagtgcaagatttgttaggggaccggttggcactagaattaaatcggagttgtatttgtgagcagcttcgataataaaatcaaccccgggctgtgtttcaattgcccgagatggagcgggtagttcaacttcaccaataccattttttccatgaatttgagcactaataggcataacttcaaagctttcggtagtttgtgagtgttcctcaccaagaaagaccggaatatccgttctgcctagtaattcaagaattttcaagctgttagtaccagcgtcaggggttaacacattcccgtatgtcgaaacaataccaatcaaatcaacgtcaggtgctgccaaagcatatgcaatggccatagcatcatcaataccagtatctagatctaagatcatttttttagttgccaaaagaacccctccgaataaacaatttatgtattaaacttactttaatcatacgtaaacaaagcttaaaagacaatcccaagcattcttttttattgaagaagctggtaatatatttggtggattataaaaatgaaattgatttaataagggagcacaggcaatgacggaaatgtatgatattacgattattggtgggggtccagccggtttatttgctggattttatgctggaatgcgcactgccaaaacacaaattattgaaagccttccacaagctggtggacaagttgctgcactttatccagaaaaaatgatttacgatgtcggtggttatgctggaataaaagcagctaatttggctaaagaacttgaaaaacaaacgcgcttggtcggaactgaaattcgtcttaacgaaaccgttgttgatattcaagctcaagctgatttttaccatgttaaaactaatcggaatgaatacgatacccgagcaattcttttagcaactggtaatggagcatttaatccgcgaaagttagctgtggaagggttggaccatttagaagataaaaaaatctactatcatatgcccgatgttgaacattttgaaaatcaggatgttttagtggcaggtggtggtgactcggccattgatattgcgctcatgctggaaccaattgctaaaagtgtcagtttggtgcatcgtcgacagcaatttagggggatggaacggaatgtacaacgcctccaagaatcgacggttaaagtgatgacaccgtatttaattaatgatgttcgcgaggctgtcgaagaaatcgatgtcgatttgaaagaaattggtaccgaagccttaaaagctacccattttgataaactaattgttaactacggatttacctctagtaataaaattatcaaaggatgggaaatcgatttggcccaagaacatcgtatgtttgccgtcgatagcctgatgcatacaaatatgaaaaatatttatgcgattggtgatggggtagagtatcctggaaagttaagactaattgcaaccgcctttggtgaaggcccgattgcggtaaatcaaattatgaacgacttatatccaggcaaacgtggacctgttcatagtacatccatgtttgaaaaataatctgaatatataaaaatgcagtgaacttaaaaactaagttcactgcatttttgttaactgccattggcatctggatttgtaattttaattcggttttcactagttgatttgtggtttgcttcaggagcattagttttgtacaaatcttcaagtgatttatcttgattcttggagaacatagaagtcgattttaagcctaatttatcttctagcttggtggctttcgttaaaccatccgaataattgtagttagctgaattaacctttttaaagtccggattcttatagaaacggaggagattcttttcatttaacgaatctgacatcgctaattgttctttagcagctttacgatctttttcaactttctttttaaaagtggtgctaggatcggtaatctcattgccggaactgtcataaagtttaccaccgatagaactataggttggtgttacataatcgttatttctaaaagcaaccacttggtcatgttgcttagacaacaggtcagtaccaaattggatatagtttttggttgagattcctaataaatgcaagatcgttggtagaacatcaatttcaccaccatattgggattgaatgccaccatctttcatacctggaatgtgaatcattaatggggctcgttggagctgtgaattatcccaattattccaattttcagttggattagagccgaattctttaaaatgatcaggatcttgttcaaaagttttagctagtgctgtattagaggaattggaaattccataatgatcaccgtataaaacaatcatcgaatcatcatacaaaccggatttctttaagaaattaaagaattcttcaacagattgatctaagtaattagcagttttgaagtagttgtctacagttttatcgccagtactaggcgttttaaaagtactatcctcatcatctaaagtgtatgggatgtggttacttacagtgatgtatttagcataaaacggctgctgtaagtgttgaaggtacttaattgaatctttgaagagaagcttatcttttagaccataggtagtggatttatccccagaaacatcaaaatcactggcagagaagaagttctcataacccatatttttataagtgctattacgattccaaaatgaagcagtattaccgtggaaaaccgcagaagtgtagtttccatgttgttttaaaattgctggagcagcttggaaggtttgatcagatcctaactgagcgaacagtgaaccttgagctgtcccaaacgtgccagtttcaagcatattttcagcatcactagttttaccttgaccaacttgatggaaaaagttactaaatgagtaagttgatttactgtgataaatgctgtttaggaatggtgttactgtttggccttccactttatcatcgattaagaattgttggaaactttctaggtgaatgataataacattttttcccttagccttggcaaaagtaacatttgacggtttggcataatgatgcttaacatatttttcaattgaagttaattcgcttttcttagcttcagaacgcattttatggttacgttcaagttggacaccatcataagcagtaaaggcatcgagccccatgtatttaacaatataagaacgatcaaaagttctagtaattaactgcgggcgatccatttccgcgagcattagattaaatgcaaaaaataaaaagcccagtgaggtgatttgaaacccaaactttttaggtaaaggatgggggtccatttttattttcttcagaacgagtaataagaaaataacgatgatatctaaccagtagaaaatatcatgaacattagttaaggacattgaggtagcacttaagccttgattaaccttggaatagcccaacatagtattaacggtcataaagtcagaaaattctctaaagtagattacattgagatagagcatgacggtattggcgacatccaacaacatcgctacccaataaaaaatttttttcggtcgaatatataatgcaagtccaaagatgaggacggttgtagcaactggattaattaaaagaattatccattgaaagatactacctacacctagtgaaatatcagctagatatgcaaacagagtcttcgcccaaaataaaatagtaataaggataaagaatccgaatctagtatcaatttttgattttaaagatttcattttttaaagacctttcaaatagaacaagattaatgcataaatgcaattttaccatatttttttaaatgatttggttaactattgggtaagggggatgaataaaataaaattttaataattcttctgaattaagcagccattaataagttatctgggttaatatgatagatatattattaaaagatagtttcggaggcgaactagtatggaagctaaaatggttagaggtgctactggaccagtttatatggatgcgttagaaattcgtaaaaaagtgtttattgaagaacagggcattgatccggctcttgaatttgacgaaaatgaagatttctttacttactttgtgggctacgacgaagctaaaccgattgtgacggcgcgagcacgacgcgtcgatgatgatacttgggttgtacaaagagtggcaactaaaactggatatcgacgtcatgggttagcgcgtgatttgtttgaatttattgaagcccaagcagttaaaatgaacattaaaaaaattaaattacatgctcaagagagtgcggaaccattttactttgcgatgaattacgagcgcgttagtggtccagaaatggaagcgggcattgtacattattggatggaaaaggcgatttaatgtattggaataaaaaagtaatcttggtactaagtattgtgctaatggggcttgcagcggtcttctttgttaaaaatgatgcttttttatatcaaacaccggttggacgtattgaaagtgttaaaaaaattagtaaaactgtccaaattgataattttaaaaatcaagattacagtgtccgacaacagcttaaagtgaaaattttaaatggtaaagagcgtaatcgaattatcacggttaataatgaatatactaagtcgcaggcgacggatttaaaatatcgtaaaggccaaacggtcttattacatttaacccgacaccaccatcagattaagacagctacaattacagatttgaaacgcgacgtacctttgaccatcttaattgtgatggtaatcggcttattaataatgatgaagtcgaccggattaagggcactcttaagcttgattttaaacaccattttatttttcattgcagtggaaatcgatgttcagcaagaggcctcaggagttttttggatttttagcggaatcgcggccgttttttgtgcggtaacgttagtattagttttaggttggaacaaaaaaatgtgggtaagctttacaacgacgatgttaggaactttcatcgcagtcgctattagtttattagtctttagacttaccaataatgggggacttcattttgaaacgatggagtacgtaacacaaaatcccgaacctttatttctagctgaaacagtactaggatcattgggagcggtaatggatgaatcaactgacattattgttagtcttgccaagttacgaaaagaaaatccgctaatttcaatgaaacagctctggatttccggccgaaatatcgggaaaacaattatgggtcctctccttaacgttttattcatgatatttatggcagatacattttcaatgatggctctgtatcttagaaatggaaacggttggggctactcgtttgaaatgaacatgcaactgggatttgtacaaagcttaattagtggaattgggattgtattaactgttcctattgctagctggctggttggcattttctttaagaagggggcggtgcaacatgcatagcgcaactttaatattgatgctaattttagccctgttaatgattattgtgggcggtgcaacgggagtccgggcctttttaagtattatcttcaattttgccatattattcctaaatattgcattaattgcatggggatttccggcgctagtaataacaagtattagtggcttgattatccttgcaaccaccatttttatgggcagtgatgatgatcaaattacccaaaatgctttctacagttctgtcctagttttgatggtcctaatcgggttaattttattgctgcaaccccatttgttagttcatggatttgccaatgaaaataatgaagatttagaggggatgtcgcttttaattggtattaaattcagtgatgtgatgttagcgacaatgatggttagctcgcttggagcggtagctgaggcggcaattgctgtgtcggctgggttacaagaattaattgagactactccagacctagactacagtaaattgtttgtacatggatatgaaattggtaaagaaatcattggaacagctttaaataccttgttttttggcttctttggtagttttctaggattattcatttggtatgttaagttaaaatacagttttagtgagtttattaataacaaaatttttgctgcggaactttcaatgattctaattggatttattggagtaattagcacggtgccattgacagcgtgggtaatgcaattgcggcaacgcaaacaaaaagaactgtaacgacgaattaggctggtgaaagcctgagacagtagttaacagttctttttattaacgttattttttgaaaaaattgctccagttggcgatgagatagacaatcaaaattaaagcaaacgaaattagaatggtcagtgtccagctccaaggcgtattggccattggtaggctaacattttgtccataaaatccgaagacaatgttggggacagctaaaataatagataagatggttagaaatttcatcgtgttatttaagttgttatccaagatgtcagagtaggatttggagacttgttcgatgatatcagatgagagctgagccatttcttgactttgttcagactcaatcacaatttcttctaggcgcgtacgttgtcccttagttaattttaagtttggcatacgaagcatgctatttaataatgaagtatttgatttcaaagatgttaataaataaatcaaactagtctccaactgtagcatactttgaattccattgtgatttaaacgagttttaaatttattttgaatttcttgacggtcaaaattaattcgtgaaacagcgtcattaaagcgaatcgttagttcatagatcgtgttgaaaacggcattaaccataaacgagttattaaattcaaaattaggatcactatttttgcgtattagtgttttaacattgcgatctaaaagtttattcacatagtgagttgaatcatgcgtaaaaaccaccagcgcctttggtagaaacatgaacgccgcgggctcggtttgaacgccttcttttaaattagcactgagtgcatgaaaaatgatcaaaaaaatgttattgggttcatcaatttcggcccgtgctcgttcatttttatcaatagcatagctcaaagcttccgatgtagcatggtaagttttgactaaagtttgaagttcaagcgtgctaggattggaaacttgaatccaagaaaagtcgtcagattttttagtaacttttagcatagtaataatcctcactgtatttaatattattagtttaaccccaatgggatgaaaaaatatactaaatcgattaaaataaagtgtttagaagaaaaaaggagaaagaatttattgaatatattaacaaacctatatggaccctttttcgatattaataattgggaaaatgtgttgtcctccagttccgactggttagtaattttttcattggtaatgattgaatgtattttgtcggtcgacaatgcagtggttttagcaactcaaacacaagttttagaagataaaaaagaacgtgaaaaatccctattttatggtttatggggcgcctatattttcagatttattgtcatcggaatcggtacctttttaattaacttgtgggaaataaaggtaattggagctttatatttagcctacttggtatttaggttctttgacaagcaaaaaagaggacgcaagacgcgaaaactagttaaaaaagaagggcgactttccgtgttctggcgggtggtaatccaaattgaatttatggatattgttttctccgtcgattcagtcttggcttccttagcaatttcatctaatccggtaattgttttaattggtggtctgattgggattttagccatgcggggcattgctgaagtaatcatgaaaatgatgcaaaaaattccggaattagaaacgatggcatacgtattaattggaatcattgcgttaaaacttttattgtccattccaatgattgatattgaaattccatctattgtttttgcgggaattgtgatcttagcctttttaattacaattggaattcactatgccaaaagaccggcaaaaaaacaatgatataatttatggtaacaagttagtaaaaaggagacagaaatggccgttacaattaatcaagataacttaactgacgtgacacaatctggactaaccattgtggacttttgggctccttggtgtggtccttgtaaaatgatggaaccagccttagagagtttggaaaaaacttatggagatcaaatccagtttgccaaaatgaatgtggataacaatcaagcagtagcagaatcttttaaaattatgagcattccagcattggttttgtttaaagatggaaaagccattgaaaaagtgacggggtattatcctgaagcaaaattagccaaatacttagaaaagaagatatcagaaaatgaaccaaagtaaaacagcgattgtgattgatagttcagccaatatagctccggaaatcgtgcgtaagtatcattttacgatcgttaatcaaccggttatgtttggtaaacatgtttatcatgagaatatggacattgattcagatgaattttaccgaatgcttaagcttgaaaagtatcatcctacagcttctcaaattccaatgaaagaaatgcaggaagtctttagtaacttagctcaagcaggttatgaagcagccttgtgcattggtttatcgggaggcttgagtggttttatcaatagtgtatcagcatcggttccagcgattaaggatctccaggtttacccttatgattcgggttctattttagctggtgtagaaaaagttgccattctagcatctcatcttctagataatggagtagatatccacgaagttttacatcaaatgcgtaaatatcgtcgacagactcaagcttatattgcagtaaataacattaaagaacttcagaatatgggaaatatttctaaccgaacctcgttagtaggctcattttttggaatgcgccccattctaactattaatcaccaagggcgtttagagatggttggtaaagagcggcaaatgaagaatgcgatggaagcaatcgaagaaatttttgacaaacaattagttgaccataccaatttagtagtaactgtaattgatgccaatgatgtagatcgtagtatgcagtggcaaagcactttaaaggctaaataccctggaatgcaagttgagtcacaacagattggtccgtatgtaggtacttatactggtagtaaagcgattggactaatttggtcgccaaaattgtgatagtatagacgttagttattaagaaacgggtggatagaatgattacattaaagtcagaacgagaaattgaaggaatgagaaaggccggtgcagtacttgctggtatgcatatcggacttcgtgacattattaaaccaggtatctcaagctgggaaattgaaaagtttgcattaaaatacttagacaaaaacggtgctgttcctgaagaaaagggatttgaaggctacgaatatgcaacctgtgtaagtgttaataatgaagtttgtcatggctttccacgtaagggtttaatccttaaagaaggcgacttagttaaggttgatacggttgttagcgtggatggctacatgtctgactcatgctgggcttttgctgttggcgaagttagcgatgaagttaaaaaattaatggaagttactaaaaaggctttatatcttgggattgaccaagctgtagaaggcaaccgaattggtgatattggtcatgcaattcaatcatatgttgaagatgaaatgggttatggcgatgttcgtgaattcgtgggacatggtatccaacctacaatgcatgaagatccaatggtccctggatacggtgaagctggacatggtcctcgcttgaagaatggtatgacgattacaattgaacccatggttaatgttgggggatggcaatgtgatacttccgctccagatggttggactgttactacaatggatggtagtctctcttgtcaatacgaacacacactagtaatcacaccagacggtcctaagattttaacatctcaagatcctgttgaagatgctaagtatttgtagaagcaaaaaaggaagccttgacttttttagtcgagacttccttttgtttttgatgctaaaatggttacatcctaatcgttattttagtaattagcgatttcaatcagattaccatcgggatctttaattaagagtgattgaacatcgccatgagttccttggcgagttttaggatcgtcgataatttcgatgaaataacttttgagatggttaacaatttcttctattggatttttagcaacaacggaaagggcaatgctaccagtagtagcttgagctggagcaaattggggttgttggtctggagtaacgaagtaaattcgttgtttgccagcgcgaacccccgcgaatggagcatcgattagaatcggcatatcgaaaacttcatggtaaaagcgttcgctacgagcgatatcagatacagttagcgtaatatgatcaatttcacgaatattcattgtatgtaagtcctcctaataacgagattaagtatagcataggcaaattggattgacgatttgtataaattcatgctacggtggttattagttattttagaaaagttaaggtgaaaaaatgagtttattatcagttgagcatttgagccatggttttgcggacaaagagctctacgaagatgcaaattttgagttaaataaagaagaccacatgggaattgtgggacaaaatggtgctggtaaaagtacgttaatcaagattttaacgggggaaaccttgccagacaaaggtcgtattatttggcaaaataaagtgacgtatggttacttagaccagtatgcggacattcctaaggaagatacgttgtatgaatttttaacgaccgcatatgcagagttatttcgtcaacgtgatttgatggagaagtactatgcagattacgctgaaaatttagacgataagttgctagaaaaagctggaagaattcaggaaaatttagatgccaataatttctatgatattgatacggaaattaatcgagtaatgaccggtttgggtctcgacgatatcggcaaagatcatatcgtaagcgaaatgagtggtggacaacgttccaagattattttagctaagttacttcttcaaaatccagacgttttgatcttggatgaaccgacaaactacttagatactgctcatattagttggttggcagattacttgaatggctttgaaggagccttcatggtaatttcccatgactacgatttcttgcagaaggttactaactgtatttgtgatgtttcatttaataaaattactaagtatcgtggtgacttccaatcagcaatgcgtcaaaaagatgcgcgtaaggaagcccaattaaaagcgtttgagaaacaacaagtagtgattgaaaaagctgaaaacttcattcgtaagaataaagctggccaacgttcgacgatggctaaatcacgggagaagatgttaaatcggatggaaaaaatcgatccacctagtgaaaacttaaagggtcattttgattttccatatctcgatactggatctcaaaatgcagttgctgtgaataaattagcggtaggttacggcaagaagcaattgcttgaaccagtgacattttcaatgtcggcgggcgaaaaagtagctttctctgggtttaacggtgcgggtaagtcaaccttgattaagagtatcttaggagtaattccagctttaggtggagaagcccatttttcaccatctgccaaagttaattacttcacccaagaattaatatgggataatcctaaattgacaccattagaaaccattcaaaaccaataccctaagatgttgcctaaaaccattcggactaaattagctaagtgtggaatcaatgctgctgatactatgaagccgatgaaacaacttagtggtggagaacaaactaaggttaaattagctttaatggagttgattgattcaaatttcttaatcatggatgaaccaacaaaccatttggatgatgaaacgaagcgggccttaagtgaagcgttacaacgctttaaaggcaatttgatcgttgtatcccatgaggatagtttctattcccaatggattgataaagaaatcaacgtggaaaaattacgtctagatcgcgaataaccaagcaaaaaagcaaccccgtggggttgcttttttaatactcaatagcttaaaagtctgtggtatctggatcctgagctagaccagctacaccatggaaaccatcaattttcttgatgtcgtcatctgaaagttcaaaatcaaagatttcggtgttttgtttaatacggtcagcgtgaactgacttaggaagaggtaagaagccgtgttgtagtgaccaacgaagtacgacttgagcgacactcttattgtatttagcagcgatatctttaagttctggaatggtaaaaatcttaccagttcctagtggactatatgcttccgaaagaatgccatgttctttattgtaggccacaacttcatcttcagtatcactaggatttaggaagatttggttgactgctggagttactttggcagttttcaaaagttcatcaagatgatgagcacggaaattagatacaccaatcgcacgtactttaccagcatcgagggcttcttccatagcacgccatgagtcagcgttgcgctgttgccattcatcacggaattggactggatttggccagtgaattaggtataagtcgaggtaatcagtacctaatttagctaaactagtatctaacgcttttttagctgattcgtagccatggtcacgattccatagtttagacgtgatgaaaagttctttacgatcaattccactatctttaatggctttgccaacactttcttcgtttccataagctgcagctgtatcaatatgacggtagcccgcttctaaagcagccttaactgcattataagcttcatcaccatctttagattgccaagttccaaaaccaactacggggattttaactccgttgttaagggtataagtatctgttaaattattcatcaaaaagcctccttgattaccaataaactatattaataatagcgcttttacaggcggtaagctagtaaaaaggactaactaaaaattagttagtcctttttaaatatgacttatttagattacttattgaaagttccagcttcaacttcacgaagataatctgcaagatgtttgaagtaaactggtgcattatcaatcatgtgatgatggccaccattaggcgttgtaactaacttagcgttaggaataacttcagccatacgacgtgctgaatctagcggcatagtttcatgttcaccaaatgtcaataaggttgggacattgatatttttaatttggtcacgaacatcccattcgttaagttttccagtaacaacgaattcgttatcgccttggaaagcattataaaccggagtagccatagttggtactaaatgacggattgcaactggttgtttacgatcaacgtaaccagcattcaaaatgtcaactaatttttggtaacgttcgttgtcccagtcaccagatttttcgcagtcacgcatgaattgagcatcttcaggagcaagagcttcatcacggattgcatcttgatgttccaaatattcgtcaatgttatcgaccatggatgaaatgatagcacccttaagatgttgaccatatttaagagcatacatcattgttaatgcgccaccccatgattgaccgataaggtagaaatgatcaattccaagtttttgacgaacttcttcaacttcgtctaagaagtaatcatatgatagatatttttcggcgatttcaggatcggagtaatctggttgatcagaataccatgagcccagttggtcatagtaatgtacttggacattcaagccttgctttaaaagttcatcgtggaagttttcccaatattcatggtttccaccagggccaccgtgaagagctaatagatggattgaatcgtcgtcaccatcagtgtgagaccataaatggtatccattatctagtgttaaaattgttgttccttgtttcaaaacactcacctagtttcttaaatttaagcttataatatcagatttgaaggaaactgaccagaacccatattgatttaccattggtttaatcaataataaatttaaaaattaaattagtgtgctaactttatttttaaatgactttggtttaactgtaaagagtaaagcagttcttggttaccacgaatggtagtctcaaaatcagtagcatagataactagtcctaattgatgaccggctaataagcggtagaatgtaggttgaagttctaattttacatcatagaattgatggggtttaacttcatcaacacaataattattagtacgattttgtaagttgatatggcctttggaaatcattttccaaggagtgaccgcattttgaagcgtgaattcgcgtagatcatcagtccgccaatcaaaactaccactcaaagagcgtggttggagaatgctaggtgaaggattgagacgtttagcatctccaaaatcaactaattggaaactaagcatcccaaatggttggttaactgctacgttaacggaaacttcaggcgtaccatcgattaaccaatcttctttagtttgtgctgttttaaaaatcaagcgattattacgcatttgatttttaccattggtggcatgttctgtgtttagcaaatcagtatgccaatgctttaaatcatttttatacatttcgaaaaattctggatcaagggaatctcgaaatgaagctgcctcgtttttagtttcagaagcacgatccaccagcgttttagcttgtagtgtaaattctcgaatctcatcgtccgctgcttgccaatcttgataagtgttccaagtttcaggttcaacattatcttgaatgattacattaggaaggacttcgttagccccattttgaacgtcaaaaagtttgtaactaagccatagattcatcatatcggtgaaatcaattgaacgaaaagcattgatataaatgtgttgaccttggtgcagaataattttcttattgatcggtaagtcccgaacagcgttccaaagcttacctacatttcgtggtttaacgttccagtcattgaggccatgaaccattataatatcagctttaatatttttaacgttatttagataattcttactgtcccaatatttagaataattacctgagtcacggtcttgatctttttcaatacgtttcaaaatttgatcaaagtgggctttgatgcctaaataatccccagcatcatgtttacgacttaaaacttcagcggccaggacatccatatcttcgccttggaaagtatctggagcagcgaccaaaccaccgtctcggtaataatcgtaccagctagaaatggctgcttctgaaatgatggtctctaagccttccatcccagtggttgcagctgcagtggcgagggtgcctagataagagcggcccgtcatggcaattttatgattagaccaagaagctttaatctcaagattatcagttttgttagtaaaagcgcgtcgattgccggctaaccattcgatgattgctgtagttgaaatggtttcttcgacagagcccgtatcacgaagtccatcagaatctcgagtaccaatcccagcagcataaaccacggcgaagcctcgagataagaagtaattattcaaagtatagggctgttcgcgagcaaaagtttcacttgcttttgtagccattccagccactttacgttcagcaggaagtgtttggctgaatggttcggcagtgacgtcggatttagaaagtttttgaaccgttttttcagttaaaggaacatcaacgttgtgcgtaattgcttctccataactatcatttgtcccttgattataaggactcgctgtatataggactggagcttggtatccatgggcagtttgagcgggtcgtaaaatttcggctttaagtaaatcgcgctgtccatcgtgatcagtatcgagaggggcttccacataaattacttcacggatcaactgatgaggatcgaagactgcttgggcttttccattgaagaaaaggggcttagtggtcgttgggtaaaaactaacgaaataaccttgttgagttaggcggtctaaatagacttctccatttttggtgtgggtagttagtaagttataccaagcgtgtgccacatctgcactagtttcaaagtttttgagatcgagttctggaagttgaattttgctaatggtactaagtggatcttcaatttgataatcagtatcggcttcaaattgaagtaattggagttctaataagataaaaatttctaaagttagtggttgatcactttcgaaaaaagccgccatagtttgatcaggggttgcgagtaggttgtttaacttttgttggaaagttgcttcgctattacttacgaggcaagaacgttttagaaaatcttttaactgggctttcggatcagctaataaatcaccatcaataaaatgaatgttttttaattcttcaagttcggtagtgcgatccagtcgtattcgaccgaattgattgtttttcataacatggaacctccacaatatttatgtttcatattatacgcctaaagcaataaaacataattaggccttgaaatattttaaaaataagaaaaagttcgttttaaatttcttacaattaaaaaataagcttttagatcgtttgtaagcatctataaacgaacattaggtgttgaaaacaatgttaaagtatggaataatatggaagttgataaaaaatattttgatgggggaacgaaataatggatcaaaaattggatgataatgcttcatatggattattagaccgaacgtttcatcttacagaacaacatactacggttaaaagagaaattttggctggtttaacgacttttgtttcaatggcatacattttgtttgttaatcctacaatcctagggcaagccgggatggataaaggagcggttttcacagcaacggccatttcagcaattattggctgtgcgttgatggcctttcttgcaaattatccgattgcgattgctcctggattgggtgacaatgcctttttcactttctcagttgttttaggaatgggaattccatgggaaaaggcgatggccggagtatttattgcttctgttttattcacgattttatccttcctcaaagtacgtgaaattgtgattgactcgatctctaaagatctcaaattagctatggcggctgggattgggatcttcatcgcatttatcgggctgcaaggcggtggattagttacagcaagtaagacttcattagtggagatgggttccttgtccgttcccacaacgtggttaaccatttttggaatttttgtaatcgcgattttaatggcgaaaaaagtgccaggttcaatctttatcggtttagtttccactgcgattttagggttggtgacaggtttgattaaaatgccggagcatttgatttcccttgctcctagtatgaaaccaacctttggagtgggaattgctcatttgccttcaatcgctgaccctgagatgtgggccgtagttttaatcttattgctagttgcgttttttgataccgctggtactttaatcgggttagctcaacaagctggaattatgaaaaacaataaaatgccacgaattggacaggctctaatggcagattcaatttcaatgttagctggatcagtaatgggaactacacccacagcaacttatgtggaatcatctgccggtattgcagttggtggacgaacaggactgacttctctaaccgttggaatcttgtttgtatttagtatgtttttctcaccacttttaacagtcgttacaacgcaagtaactgcaccagctctaatcgtggttggggtattgatggcttctgcgcttcgtgaaattaattgggataaatttgaaattgctatgccagccttcctcaccattattggaatgccattgacttacaatatttcttacggaatggcatttggattcttaacttatccaatcttgatgaccgttgctggtcgtcgcaaggaagttaattacgttgtttggattttaatggtcgccttcgcactaatgctgtatgtgcttaacaaacttccaagttagtatgaaataaattaaaagagttgtgattaaagacatttgcctttatcacaactcttttttattgagccagtttactatgatgaatcccataactaaagtagataattaacccaattccaaaccagatggcagaaccaatccaggtttccaccgaaagtgtggtaattaaatagacacaagccaaggctgaaatgatgggaataaatggatatccaggtactttaaagcccgtattaggaatatcttggcgatgacgcagagggataattcccaacgataccaaagcgaatgctagtaaagtccccatattgactaagttagttaattgatctaaaggaacgaagcctcctagaaaggcgataaaaatggtaactaccaccatggcattgcgtggcgaatgatgttcccccactaagtttcctaagaccttaggcaacaaaccatcgcgtcctgtagcatataccagacgggaacttccataaatcatagaaatcatcatggtagtcattccggctaaagcgcccaatgaaagtaatccggccacccaattttgatggactaactgtaaagctagggcaacgggattggcaacattgagcttagtgtaaggaaccatccccgtaagaaccaaagaaacggccacatagaagatggtggcaataattaaagttccgataatgccaatgggcatcgttttcgaaggatttttaacttctgctgctgatgcagaaactgtatcaaaacctaaataagcaaaaaagaccgttgaggcaccggctaaagtaccgtgcacgccaaatggaaaataaggtttccaattagtaggtttaacataaaagattccgactaaaataaaaattagaatgatagcaattttaacaaagaccataaagttattgatccgaatggacgactggaagcctcgattaagtaaaaatccgattagcaagacgataataattgcgaataaattaatgtaagttccatgacttggattaaatgatccagaaatggcagtagggatgtgtatcccaaaaccacccaggagagaaccaaaataagcggaccatccagtagaaacggccgctactgctaagacatattccaaaattaaggcccaacctagcacccaaccgggaagttcaccgtaaatgatggttccatacgaataggcactcccagcaactggaatagaggctgcaaattcggcatagcacatgccggctagcgcgcatacaattgcagcaatcacgaaagaaattgtaatcgatggtccagccttcagtgctgcaacggtaccaggaaggatgaaaattccagttccaattactgcgccaattccaagcgccagtaagtcttttggaccaatggttttttcgaattttgagtcagtctttaagtaattatctaatgattcttttctcaaaattttatctattattttcataacacacttccttttctaatatctttctaataatactgaatcagtttcactacgtcaatcggatttcttttattaaaaatgtaaatttgattaaattaaaagaacgggactggtataatttatatggaagataatgtggaggttttaagatggcgttagaacttgatggtggagcagtagtgtatcagttacgtaacaatcagccgtattacttgcttttagaaagcgcaacgagtggtttttggggttttcccaagggtcatgtcgaagataaagagtctgtgattgaagcagctcaacgtgaaattcgtgaagagacaggtattatcacgaaagttaacgataattttttcgaggtattaagttatcaggttggtaaaaacctaaaaaaggttacattatttagtgctgaagttcctttagatacgacattgcggttacaagaagcggaaattagttcagctggatggttcgattacattacggcgcgtgaaaaattatcgtatttaaacttgaaacaagccttagataaggctgatcatttcattgcgagcataaaaccaagcgtataggtaaaataaaaattgtaaataagtacagaaaaagggctgcggcacatttaagtgtcacagccctcttatcctcatttgataaagcttattatagagtttaaattatgctagcttgctgaatgaattatcttctaggctttgaagattgcgaacagcctcttcaatggttacgccagttgcatgaaactctggttgggctttatcattagcgataaatacctgcttttctgtatcaagagcgatactataccatgctgagctatattttttgaattgcataatgataaacctcctatccttaaagtgtattttagaaagctttgaaaagcgctttcatttgttaggatactttaatttacaatatttttggaaaaaatgcaactattttgaattgaggagttaaaaatggataaagttattgtgattgctggaccaactggatcgggaaaaacgacgattgccgattacctttaccaaaaatatggagtgattaaggtaattacccacactacgagaccaaaaagaaaaaatgagcaatcaggaatcgattattactttgaaacagacgagacatttgatgataaccattacttagaacaggtgcagtattcttactatcgatatggttcttcgtatgagggccttcgacgtgcttggtcaaaaaatccaattgctagtattgtattagacacagctggagcagtaacttaccttaaagagttaggggcacaggtggaaatcttatttttgcgggtaaacgaagaaaaaactttgaaggatcgattgttaaaacgtggtgatagcttagaggcaatccaaaaaagaattgacagtcccgaatatcgacgcgacatgcagttgccagaagagcttcaagggcgggcgacggtcattaataacgatgattgggagcacaccaaacaaaaaattgatcaattttatcaaagagttaaagaagcaaccaaaaagataccaaatgaaggttaattatggtagggtaaaacgtaatgattactatttagaggtgcagatttttgaacaaaactagtaaagaaattgcggtaaaaattttaaaagctaataactataaattaactaaacaacgccagagcttactcaatattctagctaaccatgaggaccgctacatggaattgacggagttagatcagttaatgcgccaagagtatcctaaaatgagctacaatacaatttatcgaaacattaaggaattttctgaaattgggattgttgaagaaaatcaaaatgaaaatgatggtaaaaccgaagtaaagttagattgtaatgaacggcatactcatcatcaccattttatctgtaataactgtggtaaagtacgggaactccaaatgtgccctctaagcttctttagtgagcaattgccaggggctgagattacgggacatcattttgagttatatgggttatgcgcagattgtaagcaattaatgggtgaaaaatagataatttttttaagttattgcaaacttaatcaatatttgaaataaaagctaaatatttttgatatgctttttttaaagacggagggaaagagaaatggcatataggacaccaccttttttaacaccaattgcgattgttaccatggtcattgctttaagtgctacaaacgtaatcgttaataaggcgaccaacacttctgaaggagcgcccgtgcgttcttcaaaagtaatgaataatgaaagtagtagtaatttagacgataaaaattcatctgatgataaatcaagtaaaagttccatggatgaagatagtagctctaaagatgatgaaacaagtagttccaaagaagatgagacaatggattcaaatagcaccgaagactcacaaagtgatgcggaaagctcatcagatgctacggcaagcagcggtaaaactagcacaaatacaaatgaaaataataatgacgatactactaacaatgcatctagtgatgctgacacggatgcaaatcaagcatctagtgcagcccaaagttcggcaggtaccacaactcagaatgcccaagctgcatcaggtagctcggcgactagcacacaataggaggaattaacgtgatttcatttcttacattagcgagccattatatgggaatgatcaatgttaagagtaaactaaagaatcaagtttacacgatcatggcattcgtcggaaattggtatttactatatattggtattcgattcttacaaaatggacgctctcttagaggattattgctattagcaatctttttagtgttcttgtatttttcgattatgaacatttactacttcttcacgactaagaaggcaccttttgatatttctcctgtcttggagaaatatgtgggtggtgctccggaagaaattcgagaaaaagaagaatttagacggcgcttggcccaagtggaacgccaaagtcatcaagctagcagttcaccagcagggatgtttgaccaacggatgctactacctgcacaggtcgaatccacgggcgaacaaaagcgaaatattgaacaaattgcgatgttgatgaaaaatgctggaatcctttttgaggattacggtggacgaagtgatgaacagattaaggaacaattacaaccaggacaaacggaagcttacgctattggggacgaaggcattcaattcccatttgctgatataaaaataatcaatgggcagcctaccatttatgctggattaaatcagatggaagagttaccagttggcgtaattaccaaagttggggcagctagtttcgaagctgctaaacaagaaaatcacctttacttggcggatgtattattaagtggcggtgagaagaaaatgataggacgctcagggattatcactgaaaatgaaaatttttttataaaagtgaatattgcctataaacgccgtaatacctcgcttcatgaggtttaaagtataaaataattaaggactgttcaagcgatatgctttgacagtcctttttttgtcgcttatattttaaataggtatagaaaaaatgggagcttataggttgtataaggattcgtttaaataaccgatgggcgcagctggagggatttattatgtcaatgatcgaatttcataatgttgaaaagtactatgggaagttccacgccctgacagatatcaacttaacgattgaaaagggggagacagtagttttgattggaccatctggttctggtaaaagtactttaatccgaactattaacggattggaaagtattaatagcggacaactggtagttaacgggtttgatttggctagcaagaagaccaatatgaataagattcgtcgtgaagtaggcatggttttccaacattttaatttatacaacaataaaagtgtgcttgaaaatatcatgttagctcctcgtgtagttctaggacggaaggatgatgaaaataaaaaagttgccatggaattgttagacttagttgggctagcagataaggcagaaagtatgccatcgatgctttctggtggtcaaaagcaacgaattgcaatagctcggagtttggctatgcatccaaagtgtattttatttgatgaaccaacatcagctttggatccagaaatgattgacgatgttttaaatgtaatgaaaaagattgctaaagattcttcgatgaccatggttgtggtaacccatgaaatgggttttgctcgtgaagtaggggaccgcgttattttcatggacgaaggacaaattctagaagacgatcaagctaaggaattctttgatggacaaccaagtaacgaacgagcacgccaattcttaagtaaaattattaaacattaggaggggagaatatgcgaaaaatactgaaaagtgtcgccctcattttcaccctcatggcaagtttagtgttgttaagtagttgtggtgcgaagggtgaagtaaaaaatatagatgcttgggatcaagcccaaaagacggattccatcacttggggtgttaaagccgatactaaactgtttggtttgatggatgttaaagattcacaaattaagggatttgatatcgatattgccaaagcgttaaccaagcaaatgctcggaaaaaaggccaaagccaactttatccaagttacgagtcaaactcggatacctttactgaaaaacggtaatttagatgcaattattgctacgatgacaatcacgaaagaacgtgaaaaagttgtcgatttttcaaattcatactttgatgctggtcaatcgcttttagttaaaaaaggtagctccattaagagcgttaaagatttgaataagcccggaactaaagtgatcggggtggttggatctaattccgtcgagaatattaaaaagtttgctcctaaggcgcaggtaattcagcttcaagattatgctcaggctttgaccgctttaaaatctggtcaaggagcagcgttaacgactgataatggtattttatttgggatggcggtcgacaatcctaattatcaagttgttggaaaagcctttactaaagaaccttatgggattgcaattaataaaggacaaggtcagttgaaaaagcatctcaaccaagcattgaaagaattggaagaaagtggcgagtacaacaaactagtcgaaaaatggtttggaaatatcgctggatttgactacaaggaggttgaaagatgattaatataattgctagtcatggctcagaacttctaagtggactgggacaaaccgtcctttgtagtgtgattgcactattctttagtttgatcatcggatcaatgtttgcgatttttgaagttttaccaagtaaagtattacacaccatcggtagaatctatgtagaagtggtaagaaacattccgttattagtagtaacgatgtttttctacatcgtaattcctcaatatgtcgcttcgattaatggatttgttgctggaacgattggattaaccatttatacatcagcctttattgctgaaaccgtccgagcgggaattcaatcagttagtggtgggcaaatggaagcagctcgctcaaacggaatgacttattggcaagcaatgcgttacatcgtgttacctcaagcctttaagattgtgattccacctctaggtaaccaatttattaatttggttaagaattcatcagtacttgctttcgtagccggctttgacttgatgtatgtaggaaatgatattgcttctacttcctttgatacgattaattcgtatttagtagtgggagttatgtacttaattataaccatgccactcagttactatatgcgttatcttgaaaaacggacgaatcgaggtgctgcatgatgaaatcatttatggatgcttactcagcagtaaatttaatgtttttattaaagggactttggataaccgttgaagtttcggttatctcaattatcctaagttatattctaggtggaatattaggatttattcggtatatgagaataaagtatttttcagcgattgtgggtttcatcattgatttgatccgtaatttaccgttgattttaattttcttctttgtttatttcggtttacctaacttaggtttgagaattgaaattattccttcatctatcctagctctaaccgtttttgaatcggcgatgctagctgaaattattcgtggaggaatcgagtcaatttctaaagggcaaatggaaggtgctcgagctaacgggttaacgtactggcaagcaatgcgttacattattttgccgcaagctcaagtacgaatgattccggcattagttagtcaatttatttctttgattaaggatacttcattagcaacgattatcatgctgccagaattgatgtatcatgcgcaaatcatttatggacaaaatactaattacatcattccaatgttcgttgcattggctgtaatgtactttattgtttgttatgcgttatcactattttcgcgttacttggaaaaaagaattgcatcataaaattatacaaataggacgagtaacctcatctaaggttactcgtcctattttttaacattgtgtttactgatcattttgacggagccactcagttcgcttaagttttgtgaagtgttctttgcggatgtcgtctaagatcgggttatacatttcatcgatggttagttcaggtttgaaacctagtttcatttgaactcgcttagattggtgattgccatcatagtaaccacaccaaatgttagataatcctaacgtggtgaagccatccttgatgaccgctgctgcagcttctgggattagcccttgaccccagaatggctctccaatccaataaccaatttcggcatcattagctcccatgaaagatttcccaccacctttattaactatttctagcccgacgctaccaattgcctcgtcgggtttgtcccttagagttacggcataaatagtagcttgcatcaaatattgttcaatcagttgtcggctattagcgacgctggtatggacgggccagccagcaatgggtccaattttaggatttttagcatactgatagatgctgggagcatcatctggtgtaaaaggacgtaaataaagtctttcggttgaaatcggcattgtttttcttttcctcctataatttttatgtcttttggatgagaagatgaattactagattactattggctgttaaaaatcctcggcgatcttctaaagcaataattcttttttgattttttaagtatggtgcaagttgctggtcaaatgattctgcactggaagctttaatgggagttagttgatactcaccaggtgctattttttgagacgtaggtttagttgatactaagcaaatatcgtagtagtcaggagtaattacgtaatacaatttgcgcaatataaagtcaggattccaatttccatccataatttcggttattccaaaatcataatcgatgggtaagcgtttgaccgattgaagataaattggtgttgcaacttttagggtaggactcgctgaactttgatggatatttaactgatcatctaatattttctctagttgctccaaccgatgccgttcggtctgaatggctatttttttagctaacagtaaatccgttacggatggattggtttgcaagatttgctttatagatgccactgaaaaatccaattgtcttaaaaaaagaataaaggatagttggtatgcttgtgacataccgtattttcgatagccatttggtgcaatttcagcgggcttaaataagccctcatcttcataataacgaatagtatgatttgttgtttttaacaaacgtgctaaggttgagatagttactaatttttctggcatgccatcacctcattcatagagtataaaccttagggtaacccgaaggtcaagaggagtaaaaaaacagacgtccataattgagcgtctgtttttactttaattattgaattacataacgagcaaggcgttgataatctttttcttttaattctgcggtaatttcggttccttcttcggtataatcggtcttttttacatcagcgttgccgttaagaaaatcgaccacctgtccctcgttaaaaggaattaagaacttagcttcaacataatttttgaagacttgttttttaattaaagcggtaaccatttctagtgattgaagttgtttagctgaataagttaattcattgccatctagagtgggataactaactccagctaaatcggctttattaaaggcgtaaatcataggaatatcggttacaccgatttcgtttaaggtatcttctgtagtttgcatcatttcacgatagtgggggtcagaaatatcaacaatttgaactagtaaatcagctttagcagcttccgccaaagtcgaacggaaagctttgactaattgatgaggcaaatggctaacgaacccgacggtatcactcaaaattaattctttttgatcgggaaacgttaacttacgcacgctcgtatccaaagtagcgaagagcatgtctttttcaaaaacttgtttgtcttcattgcgaccatacatacgaactaacccgttcatggtagttgatttaccagtattggtgtaaccgaccaatgcaacacttggaatgcctttcttatcgcgttgcttacgttgaatgtcagaagaggttgtcatttcctttagttctttattaatatgattaattttattacggattgtccgtcggtttaactccagtttagtttcaccggaaccacggttggtgaagccgcctcctgtattaccagcagtttgctgatccaagcgttgggtggaactagtacgtaatcgaggtagttggtattgaagtttagctaattcaacttgaagtttagcttcacgagagtgagctcgattagcaaagatttctagaattaatcctgtacggtcaataaaatgtagattagtttctttttcgagattagttaactggctaggagaaagttcatcgtttaaaacaatggtatccacctctaaggccgttgcaatttgaaccagatcctcaactttacctttaccaaagtaagtggcggcattaggacgctctaatttttgagtcacttgatcaaccacgtccatattgttggccatggctagcgaccttaattcatccatggcgtaatccaggttcatattggggagttcgagtcccgctattagtattttctcattcataaaataaatggcctccaaagtttgaaaacgtttagataattatatcatggaagctgattagttacatgtaattaacgtttatgagataacatggtgctttggattagagaatagttaaaataattagagtttaatattgattttaatataattttaatatatactcattttcatagtaaaagataattggttgaaaatatagggagtgtgtgagatgaaactaaaaacagttgtaaagctcggctcagttgcattagcttcaacgtttgttttggcagcatgtggttcgagcaattcaaatagtaaaaaaacagcaaacattcaagagtctgctgaattagcaacaatggatcaatctaaggttacagatgtggttggttttacccaattaggtagtacagaagaaggactatatcgaattggtaagaacaataaagttgaaaatgcgattgctacaaaaactaaagtttcagatgatcacaaaacttacacatttactctacgaaaaggggttaagtggagtaatggcgatgaggtaactgcaaaagacttcgtatatggttggcaaagaacggtaaatccgaaaacagcttcccaatacgcatatatcttctcgggtgttaaaaatgccgataaaattgctagtggtaaagcgaactataaatcattgggaattaaggctgatggcaagtataagttgacggtgacccttgatcgtccgatttcttactttaaactcctgatgggaatgccaaccttcttccctcaaaatgagaaggccgttaaaaagtacggtgataagtatggtacttcggctaaaacaacagtttataacggtccatatcgaatggaaggttggacaggttctaacttaagctggaaactcgttaagaacaagacttactgggataagaaaaatgtcaagatggatactttgaactggaaagtggttaaagacactggaacggctctgaacatgtataatagtaataagcttgatcaaatgaccttatctagtgaacaggttaaacaatacaagaataataaagactacgttaagtacttaaatgcttcaactttctacattgaatataaccaaaagaaggacaagtactttaagaatgctaaaatccgtaaggctctttcgttagctattaatcgtcaacaatttgttgataagattaaaggtgatggatcaacggttgcaacgggagtaacgccggctaagttggctaaggatgaaaagaatggcaaggactttgcttctgaagtcgatgttaaatcagcttcggaatacaatttgaaagaagctaaaaagttgatggctgaaggtcttaaagaagaaggtatgcgttcattgaacttccaacttcttagtgatgatactaccgctgctaagcagtcaactgaattcttacaatcagcatttgaaaagatacctaatgtgaaagtttcgttaagtaacgtgccatttaagaaccgtttagcaaactcggtcgatggtaaattcgatgcagttattacagcatggagcgctgatttctcagatccaatctcattccttcaactatttacgtctgataactcacaaaataacggtaaatgggctaataaggaatacgataagttgattgaggctgcgaatactactgacgctggtaatactgaaaaacgttgggatgatatgttgaaggcggaacaaatcctattgaaggatcaagcagttgctccactttatcaacaaggacaatcaatgttgcgtaaaaccaaccttaagggtattgtgtataactcggctggattgaactttgattacaagcaggcatatatcaaataattaaaaatgggaacaaattacattgggtgagagtgatacattgctcttaccctttgtgcatattggaccagagattgtgagggagatttatggcaagatatcttgcaagacgtgttttttacttgctactgaccctgttcttgattgccagcattacgttctttttaatgaagttaatgcctggtacaccattgaataatcaagcaaagttaacaaaagcgcaaattcagattatttatgaacaatatgggcttaataagccggtgtggcaacaatacttgagctacatgattaatgcagtgcatggagatttcggaacttcattccagtttagtaatcaagaggtttcttacttaattggtagtcgaattggaccttctgcaaccatcgggattcagggaatgattctaggtgtggtttttggaaccattactggatcaattagtgccattcgcaaaaatacttgggttgatggaactgctaatattatttcgattctaggactttctgtaccaagttttgttttggcgattgtgctccaatactacatcggacttaaattacaatggcttccagtagccggatggggtgggtttgccagtacagtccttccatcaattgctttggcagctaatccctttgcaaccacttctcgttttgtgagaaccgaaatggtagatgtcttaggaagtgactatattgaacttgctagagcgaaagggatgagcaaaatgggaatagttttccatcatgctttgcgtaatagtttgattccattagttaccgtagtgggtccattagccgtcgctattatgactggttcaatggttgtggaaaatattttctcaattccaggaattggggaacaattcgttaagtcaatcttaactaacgactatccaactattatgggtgtaaccatgttgtactctggtctattatgtttagttctattattaacagatatcatctatggattgattgatccacgaattagaattactggaaagggggagtaatgtaatggaagaaaaagtgaacttacctaaagatgcctttcaacctgttagtaagggtgaacgtttagatgatgaaaaaattactgccccgtcgagaacgtttttgcaagacgcttggcggcgtttaaaggaaaataaagcagcctttatcagtatgtggattttaattatcgttgcgatttttgcattcacatcacccatcactgctccacatcccaataattctaatcccgattatgctaacttaccggctaaggttccaggagttaacattaacggctttaatggaacaattgtgcaaggtggggaacgaattgatgcttataaagctaataaagttccttcagataagtatttctaccttggaacagattatttaggacgtagcttagcacagcgaatcttacatgggacgatgatttctctattgattggggttttcgcaaccatcattgatttactaattggggtagggtacgggatcttctcggcctggaaaggcggaaaaatcgatattttcatgcagcgaattatcgaaattatgtcttccgttcctaatattgtaattatggttctgttactattggttttcaaaaatggtgggattttaccgattgtattagcgattgcgattaacgaatggactacaatggcacgactaactcgagcccagactctaagtttgaaaaatcaagagtacattctagctgcccagtcgctaggtgaatcgccatggaaaatctcggttaagcatttgctgcctaacctatccagtgtcatcattattcaaactatgtttaccattccaacggcaattttctttgaagccttcttgagttatatcggaattggtattcaagctcctactgcatcactaggaacgctgattaatgatggacaacgtaatttccagttcttaccattccaaatgtggtatccggcaattgttttggccattatcatgattgcatttaatattttagctgatggactccgtgacgcttttgatccacggacagcccgtagataggaggaaattgattaatgagttcaaataaaaaagtacttgaagtaaaaaatttagcgattgatttccatacctatgctggaacggttaaagcaatccgagacgttagttttgatttacatcagggagaaaccttggccatcgtgggagaatccggttctggaaaaacggtaactactaaaacgattatgggattgttagctaataatgcggaagttattgggggaaccgttgagctacacggcaaaaatattttaaagatgaatgatcgagaattgcaagacgttcgtggtaaaaatattgctgaaatcttccaagatccaatgacgtcattagatccaacgatgaagattggacgacaagttgccgagccattaatgattcaccagaagattagtaaagaaaaggcgcaaaaaagagcacttgaaatgctcaagttagtgggcatcaaagacgcagaaaaacgaattaatgattacccacatcaattctcaggggggatgcgccaacgaatcgtaattgcgattgcattaatttgtaatccagaaattttgattgctgacgaaccaactacggctttggatgtgactattcaagctcagatcttagatttaatgaaagaattgcaagccaagatttcgacttcaattatttttattacccatgatctaggcgtcgtagccagcatggccgatcgagtagcagtaatgtatgccggaaagattgtggaatatggatcagtggatgaaatcttttataatccacagcatccatatacttgggggctcttgaactccatgcccactttggatacagctaagggcgaattagaacctattcctggtactccgccagatttattggatccaccagttggggatgcttttgctgcccgtaatccttatgcgatgaagattgacgaggaacttgaaccaccattctttaaggttagcccatcgcattatgcagcaacttggttattacatccagatgcacccgcagtggaaccaccagcagaaattcaacggcgttggaagatttatcaagatacgtttcaaatcgattcagccgaccttcgcgttggggaataggaggaaaccatagtggacacaactaaaaagattttagaagtaaaacatttaaaacagtattttaatgtcggtaaaaaagacgaagtccatgccgttgatgacgtttcctttgatatctacgaaggtgaaacttttgggttagtgggcgagtctggttcaggaaaaacgactactggacgagctattattcgacttcaagatccaacttctggtaacgtgaattttgaaggaagagatattgcttcaattaagaagcggtcagacattatggaatttcgacgcgaaatgcagatgatcttccaagatccgtacgcttctttgaatccacgaatgaagatcaaagatattattgctgaagggattgatatccatcatttggctaaaaataaacaggatcgttctgaacaagtggaagaattgttggaaacggtggggctaaataaagaccattccagccgttatccaaatgaattttctggtgggcaacgtcagcggattgggattgcccgtgcgttagcggtgcaacctaaattcatcattgcggatgagccgatttctgctttggatgtttccatccaagctcaagtggttaatctaatgaaaaagttgcaagaagaaaagggactgacttacctatttattgcccatgatttatccatggtaaagtatatcagcgatcgaattggagttatgcattatggtaagatgctagaaattggtccagcagaggaagtttataatcatcctttgcatgcctacacagctagtttagtttcagctgttccagaacctgatccagagtttgaacgcaaccggcgtcaggttccatatgatgcagcccgcgaatttgatgataaagaacgacgcatggttgaaattacacctaatcattttgttaaagcagccgatgatgagattgaagaatatcgccaacgagcagaagcttacaaaataaagtgagtataaaaagaagcttgacgtttttacgtcaagcctcttttttatattttagtagttttaccaaagtatttaatttgtccactattttcagttaactgaagttccgtaacacttccgttacgaggactgtgagaaacatcgatttgatcgttaaacatggatgttaaaatgcgaatcaaggttccatgggagaccaccagcagatgatcgccatcttgagcttttttaaaggtataatccaatccttgctttagccgagtgacaatttcatcatagctttcagcatcatgaaaaggatcaacgtccttccagatatcaatagcgaccttgataccatgcatagccgtcatagcatttaaagttggttcaaccgtggagtgttgttgatacaatttaaactctgtttcgactgagttagctccttcgaagtaaccaaaaaattgttcgcgaaaagctgaaatcatctcaatttctttttcatttttaggatgttggttttgggcattgatgtaacgagcagtcttaatcgctcgggtagtatctgagcaatagatatttgcaaagttaacatcagtaagcaaatcaccagcatgcttagcatctgcaacgcctttttcagttagtggtgagtctgaccaaccttgaagatgacgataacgattaaataaagtttgtccatggcggacgaaataataattgacggttttcatgtaactcctatgctttcttaaatgcttttttaaagatattaaagaacagtgcataaacagcaattgtaataacgactacgattccccaagcaaagacgcctgaccaaatttgggcattgtacccaccttgaatggtgaagtaagcaccaatggcaaaggtgacaatcgcaaatgggtaagaagaacgagaaactttctttaattcattccgttctacccaagccataaatggtagtagcgctgagagtgcaataaaaataattggaataataatattaagtgcaagttctttatcgtataagttagtaccaagagttgcgtcagtaggacgaattcctaagaacgagaagacgatggtaataacgaaacaccaagctccaactaaccaagctacaatatcatttttgatgaaaacatattgtgatggaaaatccttactattttgccgaattcgcataaaggcaaagaaaacaaaactagtaacgaatggtgaaacaatcccattaatattaagtaaccagttaaacatatcattaatacttgggagccagttactaaggaaaagcactagtgaaacaattccagtagttaaccagtaaccattaattggtaatccatcactgtttaacttacctagtgatttaggaagatacttcatagctacatctgaaaggaagattcgggtacttgcatctaaaattacggccaattgagcaaacatataaactgcttgactgacagcgaagatgtacatgaatgtatttccaatcctgaattcatcacccaatgcttggaaagcataataagagccattcatcttcaaatcatatggtaaatggtgggcattaaagaacactgctaatgagaatgatccaaagacggttaagaaaacggtcatcaagaggagcatcatcatggctttaggaaaatcgcgttttccatctttcatttctttaacgtatggtgcggctagttcagcaccgttgatagcaaagattaacaaaccaaatgttgataagaaatgaccatcaatcttaggaataaatgcttttaaattaaatggttgagttgcaatatgacgaccgtgcattaaagccactacggtcataattacaaataggatggtcatcacgaacatcgcaccgccaccaatggtacttagaatttcaagtgaacggtttttgaagaagtgttggaaccaaataaatactaagaagacgacggcagtaaaaatagcaaacatgatggttggcatgtatttttgtaaatcaccattgcctttgactaaccaactaattgatacaactaccgaattagcaacatcgactacgtatggtaaaccagcaatccagtagaagaaagccacgatgtatccggctaaatctccattggtagaacgaatccaggatgctaaaccacccccatcttcgttgaaagttccacctaattgtccaaccatcatttcatagggccaaacaaaaagtaaaatcattaaaatccaagttgaaacaattgctaaaccttgattgtgaaaattataaattaaatcgtcgaacccaataaccgttacaaagtccattaaggctactacaggccaactaatataccttttttttgaatctaaaggtgaattatccattcttttatctctcctaaaatttgtttacaaaagctcttcgtctccatgattgttgtattcatcgagatgaaggccatcttcgtctaaagtaaaacgattaatactaccattttgaggaccccaagtaatatctagtgttggatcagcttttcctgccattgaacgaattgtagttccatgactgaccactagaatggtgtctccatcgttatgggtttccatcaattgggcaaagccacgattgagacgatcccagaattctgcatcattttccgcatcatggaaagggtcggctgctttcatcgcatcttttgaagcagcaatcgggttttcttccaaaaattcatggaaagttcgtttacctgaaactggcattaaagcttcgaaccaagcttgggcagaatcactaccttcgtaatagccgtagaattcttcgcggaattctggcatagtttcgattggtaattgttcatgcgcattttcagccataatggcgttggcggtattcattgcgcgggtagtatcggaggcataagccgcatcaaacgcaatgtttttcaaacgagctccggcccgatgtgcatcagcatagcccttttcggttaacggggagtctgaccaaccttgcattcggttatatttgttgaaaatagtttgtccatgacgaacaaaatatagttttaattttttcataaaaatcctttcctcacttattttttgtaaaacctaaatcattctatcatatatcccgtgtaccaaattagctaaatctttgtgaaaacgcataaaaaggagtaaaatttatgtctaacaaaactgagaggtgattcacattggcagagggaatttttgaatacgaaaatagacatttagatgaagttttagataaggtggatactgcaattgccaaagcagaaaatgacgccgataatgccgaaaaagatcgtagtgcgattgataagaatttttacaacgatgttcgaattaacacttccagttattcaggtatgatggatactgcaatttcaatccgtcaacaacagcaattattatctgaacgcgaaaatagttggcaacacgctaataaacgtttaaccacgtttaaagaaatgaaaaagcggccctattttgcacgaattgattttcacgaaaaaggtgaaaagaaggatgaaaccatctatattggtttagcttcattttcggacacggccgatcattttttgatttatgattggcgggctcccatttccagtgtttactatgacggaaaaatgggcgatgtggaatatgcaacgccagatggcacgcaaacggtagacttgaagttaaaacggcaatttactattgaagatggtaaattgatttcagtttacgatacggacgaaactatcggagatcaaatgctactaaacgcgttgggttctcaatccgatgttaagatgaaaagtattgtttcaaccatccaaagagaacagaataaaattattcgaaataccgcagccgatttactattcgttcaaggtgcagctggatcgggaaagaccgctgcgattttacagcgggtcgctttcttgctttaccgttaccgcggtaatttaaatgctggacaagtcatcatgttttcacctaatcaattgtttaatgattatgttgatcaagttttacccgaactgggcgaacaaaacatgattcagatgacctattatcaatttactagacgacggattccaaacatcgacgttgaaaacttgcaacaacgttttgataagaagctcacggatgcggaacgtaaaatcgaacaattcaaaggaagcttgcaatttttcaaagctactactaaatatgcgaaatatcttgggacggtaggtatgcgattccgcaatatcatgttccaatgtcaaccgtttgctactaaggaaaaaattaaagacatctactattcatttaatactacctataacttgggtaaccgaattgaaggaactcgggaagccttgatccgccaattgaaccaaaaagtaggtagtgaattgagaactaagtgggtggaagaagcggtccaaaaccttagccaagaagaattacacaacctatttaaaaacgagccccgtgaatttaaggataatgatgaagaatttaaattccttgctcgtcaaatcgtaatgaaagaacttaaaccggttcgaaatgcgattatgcgtaatcgcttcttaagtattaatgcccaatatgtccaaatgctacgttcgttccccaaatggtacgatttaaagaaagttggggtaacggaagcagaatgggataaccatgtggataaagtggtgaacgggcttaaggagcatcaattaaccatggtagatacaaccgcttatttatacttgtatgatttaattacgggtaaaaaaggtgatcgttccatgcgttatgcatttattgatgaaatccaagattataatgctttccaactagcttatattcggttcaattttcctcgagcaaaattcacacttttaggagatttaaatcaatcaatttacgccaatgaaactagtgatactttattagcagagttatcaacaatgtttgatccagaaaagacggaagtagttcaactatctaagtcatatcgttcaacacaacaaattacagactttactaaggaaatcttggttaaaggtgaagcaattgaatcctttaatcgtgcgggtgaattaccaaaggtttcaattaatagtagtcatcaaggaatggttgaggcggtgatcgaacagcttcatcgcgattgcctagatcatgagactagcgccattattgggcggagctatgctgaatgtgaacaaatcgcggatgaattaaaagcagctggcgagcaagtaacgctaatccgaactgaaaatcagcgtttggtggaaggtaccatcgttgttccatctttcttagccaagggattggaatttgattcagtaatcgtgtggaatacctcagcgaagatttatcaaactaatcgggatgaacagttattatatacaatttgttcacgggcaatgcatcgactcttaatcgttgctgagaatgatcttagtccgttaattactaagattcctgaaaatttatatattaaaaaagcttaataacttaaaatacaacacaaagagcttaaaataagatacttttttattaagctctttttattatattttgatatagttaactatgtaatcactttcaaaaaccaaaggagaaaaaataatgattcaaagtagttataccgggtcagattcaattctcgatagtttaatcaaccatgatgtaccatatatttttggtattcctggagccaaaattgatttgttatttgaacaactggaacattctaaccgagcaaaaaaacctaaattaattattacaagacatgaacaaaatgcggcatttatggcggctggtgttggaagaattaccggtaaaccgggagtagtgcttactacttcaggacctggcgtgggaaaccttgcaacgggattactaacggctacggctgaaggtgatccagtattagccattgggggccaagtaccacggaatgacttattgcgtttaactcatcaaagtatgcggaatgctgctttatttgaacccatcactaagtttagtgtggaagttcaagaaccagaaaacatttccgaagttttagcaaatgcttaccgggcggctgaatcatctaagcagggagctagttttgtcagttttccacaagatgtggttaatgcaccggttagttcgcgtccaatcaaacctttaagaaaaccgattctcggaccggcgagcccgattgaaattgaagagctagctaaagccattcgaaacggtcaacttcccgtattgctactcgggatgcgggcctcgtctcccgaggtgacaaaagccgtccgcgaattagtacggattgctaacttacctgttgtggaaaccttccaaggtgctggtattatttctcatgacttagaagatcatttttacggtcgagtggggttattccgcaaccaacctggggataagttattgaagcatagtgatttagtaatcacagtgggttacgatgccatcgaatatgaacctcgtaactggaacgcagaaggggatggcaagattattgtcattgacgattcgccgtctgaaattgatcataactttgaacctgaaaaggaattagttggggacatcgcgcaaacgattgatttgctaactccgcatcttaaaaattaccaagttggtgtggatggtgaacaatacttggaaacactccgtgagctgcaaaacaagcaagacttgccaccagtaccgaagcaagattccaaacgtattcatccattatctattatttccgcacttcaatatcgggttgatgatgaaatgactgtctcggttgatgtgggaagtttctacatttggatggctcgtcacttcagaagttatcagcctcgtcatttgctatttagtaatgggatgcaaaccttaggagtagcattgccatgggccatttcggccgctttgttacgtcctaatagtaagtcagtttcagtttcaggagatggtggattccttttctctgcgcaagaattagaaacggctgtccgtgaaaagttagatattgttcatattatttggaacgatggatactacgatatggttaagtttcaagaagaaattaagtatggacattctgcaggcgttgactttggccccgtagattttgttaaattggctgaaggatatggcgccaaaggattacgtgtggaaaaaccagaggacttgggtaaaattcttgacgaagcatttcaaacagaaggaccagtagtggtggatatcccagttgattattccgataacgttaagctagggcaatcacttcttcctgaccaattataggagggatttaaatggcaaaattatttcaacatgggacgctcgcaatgctagtagatggactttttggtgggacgcttgcggtttccgatttactgaagcacggtgactttggaatcggaactgctgaaggccttaatggcgaattaattattttagatggagtcccttaccaagcgctagcagacggtacaattagggttattggtgatgatgaactattaccgtttgctaacgttaattcagcggattttgaaggacgagcagtgttatctgacattgagatgaaagatgtggatgcgacacttgctaaagaattgtcatatcaaaatacatttgttgctattaaaattagtggaactttccgtacagttcaaactcgggtggtaaagaaacaagaacgtccttatccaacccttagtgaaacagcatctaaacaacaagtttttaatgctgaagatgttagaggaacagtagttggctactacaccccagatcttttccatggtgcgggagtagcggggatgcatcttcattttattgacgatcaacacgaattcggaggtcatttactagactttaaggcggatcaagttaaactttcttggcaactattagacggtttagacctcaatttaccaattcaagacgcagaatttatggcacatgaggctagcgacgcggaaaaaattcaacaatcaatttctgagtctgaataaacgaattatctatgctagaatagacgtaattttttgaagatgaggaattggaaatggaagcacaaggttattttgagtttaagcgggaagattggcaaaatttagccaaacgagccgaattaccactgacgacgcaacaattaacagatatcaaagctttaaatgatcaaatttcactcgaagacgtgcaagatgtttacgtgccgttagtacgattgctccaaaaaaagtatgcggattttgaaaaatggaatcgtgataaattagactttttacaattgccagttaaaaaaacgccttttattatcggtatttcagggagtgtggcggttggtaaaagtacaacagcacgtttactacaagaactcttgagtagctggtttacgagcttaaaaacccagttaataactaccgatggatttttataccctaccgcggaacttaagcgacggaatattttaaatcgcaaaggatttcccgaaagctatgatatgaaatccttaattaagtttttaagcgacgttaagagtggtaaaaaagaaattaaagtaccgaagtattctcatcaagtttacgatattgtggaaaatgagtttgatacgattgatcaaccagatattctgattgttgaggggatcaacgtgctacagttaccggctaatgaaaccatttatgtgagtgatttttttgattggtccatttatgtggatgcggatgcaaatttaattgagcaatggtttttagaacgcttcggggtattgcttgatacagcgttccatgatccaactaattattattacaaatacgctaaattaccacgttcggaagctttcgaaatggcacataaaatttggcgagatattaatttaaaaaacttggaagaatttatcttaccgacacggtttagagcggatattattctgcataagactacgggacatgtaatggataacattttagtacgagtttaaaaagattgcctagtgaggaatagctcactaggcaatcttttttattataggttatttagttactggtagctaaaagtaaattatccacatcattaagcttgatttgatggcgttctagtttagtaattaaatgctgctcgtgccattgcttgaagtaacgactaatggtttcaggtgtagtgccgaggagggtcgctaagtctttgtttttaaggggtaaacgaaccggattttgatttaaagcagatgcggtctcgactaagtagtcggccagacgacttgctacggattccgtattggatttagtcgtttgacgctctaattctaaaagtcggctacctaatgtgttcataacgttcattccaatctggggataacgcgtaagtaaattttgaaaatcagcgcgattaatagtacaaaccgttgagggagtgagcgtaatagccgtcgagttatgttcggtttgattaaagagcgcggcttcaccgttgatatcaccagcttggaggagatataagagttgttctttaccattttcggcagtacgaaagaccttaatttggccgttggcaatgattgagagtgcgtcaattcgatttccttcttgatataagaccgaattggcaggaagttgctgatgatgcacgatggattccactacagcagtttgttcgatatttaagtttttaaaaatcgggactagtggaacacagtgatgctgatgaagttgtttaggcaaaatatgacctcctgagttaggttacttttataatagctaaaattaaatttaaaaaaattgacctacgtcaatttcaactagtttgaaaccttatatgcttaatataacaaatcaaggaggttagttgaaatgacaaaaattattatgaaattggacacgttaacttgtcctagttgtatgaccaaaattgaaggggccttgaataagatggacggtgttaaaggggtaaaagtccttttcaatgctagtaaaatcaaggccgaagttgaacctgaaataaaaggtgaagccttgaaacaaacggtcgaaaatttaggatataccgttaaagacttaaaaacaaaggtgagtgaaggctaatgcgtgaagaaattgaagagctatatcaagctgaacaaaaacaaaatgaaattgaccatcatctccccacagctggggcaatgactaatcacatcttggcaaatctacgagtgatgtcgaccaaattaaaccaattagaatggtatataaaaggaaacaattattttgcggatcaacaatttttaagctcgatgcgccaaactgtggataactactttaaccaattaggacatcagttagtaaatgtaggagaaaagccttcatcaattactgaagaattttcagaatataaaatgttgacggaaaatgcgcgcaataaatatttaacggatcaagaaatgttagcaatgttagtcgatgatatccaaaccagcaagatgtttattagtcgagccattattttagcccaaaatgaaagtaaattttcattacaaaactttttgattgagttagatggtagtttcaatcaattttcagcagcaattcaagcgcggttaggtaaagaacccttggaaggcctggaagaagatgacgacgaagaggatgatgattaattttggctaagatacagcgatggtttacacaacatggcaatcccatgctggtagtagctggaacgctaaccgtgattggttggttaatgcaacacttagctgaccaggggttgattgccaatggggcttacggaatagcaactttggtagccggactacctatcatattcaaagccatttctgctttgcgagcacgagtgatgagcattgaattattagttagtattgccgtagttggggcagtagctatcttagaatttgaagaagcagcaatggtaacatttttgtttgcctttggaaacttcttggaacagcgaaccctacaaaaaacacaccaagcgattcaaaatttaacggaaatgcagccaacaacggccaccatggtggttgatggtcagtatcaagaagttgaaattgatgaggttgatgaaggggcagttctggttgtgcgagttggcgaccaggtcccagtagatggtgaaattattagcggtagtgctgaagttgatgaagcgttaatcaccggtgaatctaaattagtggataaaaccactggagaccaagcttatatgggttcgattgtggaaaacggccaaattttggtgcaagctcaaaaagttggcgaagatacaactttcggaaaaattatcgaattagtggaagaagcccaggataatcaagcaccgatgagtaagtttattgatcgttttgccaagtattacacacctttcgttttggtagtggcaatattaattttacttttcactaaaaacttacggttagccatcacgattttggttctagcttgtccaggggcactagtaattggagcaccagtttccaatgtagctggaatcgggcgtggagctaaggctggaatcttgattaagggtggagacgtaatcgatcaactagcccaagtggatacgattttgtttgataagacgggtacagttaccgaaggacggcccaccgttaaaagcattaaagaatatcaagaagatcactggctagcattagcagccgatttggaaaaacaaacgaatcatcccttagctcgttcgattgtggaatactacgaaaagcgtgggcaaaaaactacagccgattttaatttgcctataacaacgattaaagggattggaattaaaagtgaatatcaagggcaaacgatttggattggtagtcgtcgtgttttaacagaaaatcagattgagctaacgactcaacaagcccgcgatttacaggtcattgaaagtgatggacaatccgtagttttgatgactgttgaccaaaagctggtgttgatgatgggattagtcgatcaggttcgtaaaggtgtaaaagagacgtttgaaaaattaaaacagagtggaatcgacaagcagtggatgctaacgggtgataattcatttattgcggaaaagattgctaagactattgggattaatcaggttaaagcacaaatgctaccagaagaaaaagcactgtttttggagcagttacaaaatgatggtaggcacgttctatttgtcggagatggcatcaatgatagtccttcaattgccaaggcaaatgtcgggattgcgatgggaaatggaactgacgtagcaattgaaacttccgacgtggtattaattgattctgattttagtaatatcaaaaatgcccgtcgggtggcaaaggctactatgcgaaacacgatgcaaaacgtaggaattgccattggaaccgtggcgttgttattaatcggtgtggcttatggttgggtcaatatggccagtgggatgctttttcacgaaataagtatcttagtagttatttttaatgcaatgcggttgttaagaatgaaattttgaaaacgttaggtagtaagataatgacgcgattgatagccttttcatcgattgtgaggcaagcttaggggctatggtttttcccatttttactgtatgatagatgagtaagaataaaagaatgaggtgaaggacttggcgaacgcagatttatcaaattttgataaaatcattgttttggatttcggtagtcaatacaaccaattgattacacgtagaatccgtgaattcggtatttactctgagcttctttctcataagattactgctgaagaaatcaaaaagattaatcctaaaggaattatcttctctggtggacctaacagtgtttatgataaagatgcctttcgaattgacccagaaatttataagttaggtattccaattttaggtatttgttacggaatgcaattaatgacttataacttaggcggacgagttgaaccagctgataaccgtgaatacggtcatgctgatattgatgtgactgatgatcaagcggttatgtttaaagagcttcctgctaaacaaacagtttggatgagccatggtgatttggttcgtgaagttcctaaaggatttaagaccgttgcaactagcgcaaactgtccaattgcctcaatggctgatgatgctcgtaagttctacggggttcaattccatgctgaagtacgtaatactcaatatggtaacgaaattctccggcactttgcatttgacgtttgtgaagctaaagctaactggtccatgaacgactttatcgacatgcaagtacaacaaatccgtgaaactgtgggagaccgcaaagtattgcttggtctttctggtggtgtggattctagcgtggttggggtattgctcaataaagcaattggtgaccaattagtatgtatcttcgtagaccacggtttactccgtaagggcgaagcaaagcaagttatggatagtctagaaggtaagtttggtttgaacattatcaaagtggacgctcaagatcgcttcttgagtaagcttgctggtgtttcagaacctgaacaaaaacgtaagattattggtaacgagtttattcaagtatttaatgatgaagcacaaaaacttaaaggaattgacttcctagctcaaggtacgctttacactgatgtaatcgaaagtggaacagatactgctcaaacgattaagtcacatcataatgtgggtggacttccagaagacatgcactttgaattgattgaaccacttcgtactttatttaaagatgaagctcgtgatcttggtgaaaaattgggaatgccagaagatctcgtttggcgtcaaccattcccaggtcctggtttgggaattcgtgtaatcggtgaaatcactgaagacaaacttcaaatcgtacgtgacagtgacttgattcttcgcgaagaaatcaagaaggcaggtctcgaccgtgatatctggcaatacttcactgttttacctggaatccgtagtgttggtgttatgggtgacggccgcacttacgattacacagtaggtatccgtgccgttaactcaattgatggtatgactgctgactttgctcgtatcccatgggatgtcttgcaaaagatttcggtacgtatcgtaaatgaagtggaccatgttaaccgcatcgtctatgacattacttctaagccaccggcaactgtggaatgggaataaaagtaatataaatatgtttatgtaaatttaatctctaaattggattttttgaaatctaatttggagatttttttgttgggtcataacaaatctgtatacagtatctaaatttatttaaagcttacatagccctttaaaaaagaaagggagattggtattgttagtagttgaaggaacttaatataaatattcactttgggtttatttgataatttagatgaaaaaataacttaatgttttatcaattaagcaaaaagctaatgttagcttatccttggttttatttctagattagaatgtagtgattgtgatgacaaaacattttgaagttaagcaaaagtgtttaactattagagaaatagtatactcaaaattgaaggaaaaattaattaaattattctttatggaggattatatatatgcctcaggaaactatgaagcgtgcacttaggatttttatcagttcagcaatggaaaatggaaataattttgagagagaaagaatattagatttacgttttaaattaaagaatcgactcgatgaatataaaatttttgagccatggattttagaagaatctaatacatcttcaatcgaactagaagatttatataaatcagaacttattggttcggagttggttatagtgcttctagattcaagatattccattcctgagggggtacagaaagaaattatcactgctagaaataataatgtgaagcgaatgtactttatacttccaggaaataataatgaggaacaacatttaaaataaaatttattggtacaaggcgaaaccaaatttattaaagaactttccaaatcagatgattatgtaaaagaaattgaagatataattttaagagaacttgttaatgtatttagacatgctagtctgcaagaaagaaaaatgattagtagtgacgaagatgttaattctatagaagacggtcccaatatgtcgttgataccagagttgtcacagttcaataagaccacgtttaatcagattggttactcgaaacagatgtttagacaacttatttttcatgataactcagatgaaaaaatacttaatcctcagtcagctttagacgagggagtaagtcaattgatagatagaattgtatcaaataaaccactaaactttcattgggacgagaatatgcttgcgactgtgaaagaaattaactctgagccttccctttctcaattgtttttaagtgtattatcgcagagacttaaagcaattagacttttttttaatggaaaatataaagacactttagaagttttgaaaagtattttaaaaaatgaaaatttaactatttttccgaattggttcatacaagatatattaattgatcttagaaatttattttctcaaataaaagctcaacataatgaatctcattcaataaatccctaccaacagagacttaatgattttgcaactccttttttctatccaggaattgatcattcgcttaacgaggtgtattcttgggttcgtcaagagaataaccatactcttacagcctcacctactcaaacaagaatatatggtacaaacataaatatatactctgatgctttattagaagcaatagtatttgcagtttgtaatggatcaattgcacaaattcgtcaacttcctcaaaatttaaatatcatttctgaaatgcttcttcaaagatttaaagaccgtttatattttcgagatgtgattcaaaataagcttttaatggggaattcatttagtaaaatcaaaccttggattagaaaatatagttatttactcggacagttctccgacagagatgcacaaactattgttagtagagtgcattcttattcgacaggaaacgaaaaagtttcggttctttcgacaactatacgcatagttggagattacctgactgatgaacatttttgtagagaatggaaaatattatttaagtctattaatgattggattgacgctccagagcttatcgttagccctgcaaaagaaatattagggctacttcgttattgtttcaggattcctcaagacgatataataaatattttggaaaaaatatctaaaaacacaacaagatacaatgatgatctgattgacataatcgttggagctatagatcataaaaatgccacaccggttcagcgttgtagaattaacactattatcatgacaattatagctattaacgatagtgatagtttttctgataaagtaaaaaatgcaattcgattggttatttcatattggcctgatgatactactggactatgtgaacaattaaagaataaatattacaattttttcaaacaggatattttgccatatgttgggttagataaatctacctcaaatttacaaacttatttaaacaatgaaattaaggtaatggtatcccaaaataagaagcagagtggagaaataacatatggatttgcaaccaatccagcccaaaatattcttggtgtactttctagtaaaagtcgagttgaagaattgacattttttttctctgtatgaagcgattagtgaaactatattaaatccataccaacaagttgatgtaaagcaatcagcaacaaaatttttgatgtggttaattgtgcatgatcaaaaatcacaaaatgaaatagaggagttgtttaaaaaggttgatatcgctaatattacagcaatatcatctgatttttttgaaacgactactccaacccaatttatagaaactataaagacctttatatcaatttctttatcaaaaaaagataatggacagttacttttagcgctagctttaaccacatctcaaaaatacttgttatttttttctgattttttagttgagtttgtgccactggcactacagtttgattcgctatctagtgtgattccacaaatattacaatttttgattacctataattcaaataaaagtgaaaatgatttacttataaatatttcagaatgtttgctgattctttcagaagtttcaaattattctcaaatggctcttggacaacttcaaaaaatggtatcagacacaaatgatgttgtaaaacgtaatattgtcagtcaaataaagaaattagattgtgatacaaataatcaattacatgtaattaaggaacaattaattagtagttcaagttttgcagttcgagatcttgccaaacgagtactggaataagataaattttatttattttagattgattatagtgcttgtataattttttccgaaaaagaactagatataaacatcgaacgtggtttgattatttgttaaaaatatttattcatattatcgaaatttatatgtagtattagttaaatttttacagcactttttacttcaaaaattatatcagttatttagttaattctgtaagtttaactggaatggtggcgattaaacaattaaaataattaggtagatttaggaatttattatggaattatcagtacagatgagttgacacaagtgcgactcatctggtattacttgtttaaataagaacgcaacatagttaatttgaatgtaatcgttgatgaatttttaggaataaattcagtaaaaagtaaaaatactgatataaattagtcaaaagtagtttagtgacttaatgtggaaaatcctaaaaaagtggaatgagatatagttaaatggcattttggttatcaagacattttgcatctagtagccatgtaattaacagaagttccagccacggagaggaaagggttattcaaaactaataatagttgaaaatggggcctagttaggagtaggagttattattttgtccggagttaaccattggtagagggagtataatagctgctggagcagttgtggcaaaagatatagaaaaaaattgtttatatgcggaggttcctgcaaggaaaataaaggttttagaaacagtctagataaatggccttctctttatgaacgacttgtattgcggtgcttaactagtagttatctttttgctaagagttaaactgagtccctataaccccgggtttcagttattatttttttataagtttagattatgttatggtacaattctattgtttgataagtttgcatcctgttttaaacatttagtgtcagaaactaaacaaaatagattaccaaaataaaaaacttcagaaagaccaactttctgaagttttttatagttttaattaaattgcaaagtattagttctctgaaactaggaaatattggaaaatgtttatatcatcttcaaattttatttcatagaaggtgtggccgtcaatttgacgttcatcattcagatcaatataagtgcgatcgggatcagcaatgttacccatttcaactttgtggccattgattgtccatttatcattggaataatcattaattacttcatacttgatactaccatcctttttaaattgaatagtagcatggtctaagttatcgacagcattagcataagtagtaggatattctttggtaatataaaattttcgtccagctatctgtctagctggattttgataaagcgattttcaacaaaataaaatagctatcaatgtcaaaagactgataaggatattactcatttgaaacctcctgaattagtacctacaaatccgatgtattcacacctctaatgtgtagattagttagttacttttagcaatatttttttataaaataggtaaatttagctatgttgttttaccttcgatttcgttagttttaattttggaaggtggttactgcatggtaaaaagattccaatttattagaaaaaacagaaaaagaaaaaatttaacaatcgaacaattagcagaaaaggcggatgtttcgattgatttagttgccagattagagcgtggagaacgtgaagacgtatctatatcaaaactagaaagtatcttacacgctcttgatctagagctaggggatgtttttaagcacagtaaattagataagaaaagtgatgaatttgttagaaaatttttaaagttagatgccgaaacgcgtgaaaaatatacagatatatttcttagcattattgatttaaaaaatgaataaatgtaaatttatccattttttgtatcggcttacataaaaatgaagcattagttacttcgaatagatattttagatatttttctttgaattatcatcaatttttataatgaaattcttatttataaattaaattataagtcattgatttacgcgtgctagtatattataccgcaaatgttgtgtttgttaatacgctttcttcaaattttgaacgtatattcactaactcttattaaggatgcttaaataagacttacttatttttataaataagttatcgctaatttatcattttttttggaaaaaattacttttttaatttctacaaataaatctagagatgtggttgacacactaatttgtgagtttgtatactaatacgtgcatgttcggttgcttgagcaaaatatcctggggttaatgttttatgggatataatgctatacaaagttagagtgcaggatgaacagtaaagaattgggaagctttactgattttcattagcattctaattaaggacatgtagttggaatagcagggaagtgcttttttatttaactatttaaaaaagccaaagaaaaggagtaagaatataaggagtgtttatcgtgggaatacggatagatataacgggtaagaaatttggtaaattagtggctaagtatccatcagggaaagcaaaaaatgggaatactaaatggcactgtgtttgtgaatgtggacaagaaaaagatgttgaattacagcatcttaaatctggtggcacaaaaagttgtggaaattgttccagaatgaaatatgacttacaagggaaaagatttgctcgactaacagttttgggtagagcggataaagtcagttctaatggaaatatttattggttatgtcgttgtgtttgtggcaagatgattgaggccgacagttaccgtttacgaacagggaacgtaaaaagctgtgggtgcttacgtaaagaaaaggctgctcaaacaattcgaaagaatgcagcaacggcagaacaaattggaaacagtaacgctttcaaggatcggaatgggaatccggttcaagcagtcaacattggagctagaaatactagtggtgtaatcggtgtttcgtttgatcatccctcacaaaaatgggttgcacgaatgatgcataaaggagatttagttttaaatgctacatttctagatttcgaagaagctgtggaagcacgtcgaagagttgaacacaagtatcttaaaaatttaagtagaacaaattaatttaatgaaagacgtaacgctgataaaacaacgttacgtcttttttgatggaccaatttgacaaatctttcaattatttccattatagaagttatgtacttttaaaaagtaacattgagaggaagagttttaatgcaagaatcatcaacaaaaaaatccaatccgatggtagttgtggcgattgtggcactgatgtcttttatgggagttttaacggaaacttcaatgaacgttactttcccagctttgatgcgagaatttaaggtgtcattaagtacagtgcagtgggtaacggcaggctatttgttaatggctgcgttagtcatgttaacttcagcctacatggaaagaagatttaccaatcgacagttatttgtggcagcagccatcttatttggattgggagatgttatctgtggcgcagcgctgaatttttgggtgctcttggtaggccgtttaattcaagccggatgtgtggggttatgtactcctttaatggttaatataattttagaggttgtaccccaacacaagctaggaacttatattgggttagccaatttaattattttaattgcgcctgccatgggtccaacctttggaggggccgtggtcgcttttgcaagttggcgaatgattttctggggaacattaccgattgcattgattctaatggttttagggtctaaaaaaattaaacaatataccccaactcaaaaacagtatgcttttgattggatacgttttattcttttagggttggcactagtagccctaattgttggactcaataatttggggtcaggcgcttatatttcatttatcgtcttactattacttagtattggtttaacaacgctgtttgtaaaaaaatctaaaaatgctactaaagctttattttcactagacgtattcaaaaataaggcctttctatttagttttctaccatatataatgttgcaattcgctaacgtagggattaactttttgcttcctaactacgttcaagatgtattccaagcgacatccttaattggtggtttgattttgcttccagggagtctattaaatggatttggacaaccagtttatggttggatgttagataactttggcggaaaattaccattatatatgggtgatattttatttaccttagcgctagcatccttagccctttggggaccacatatgggagtattgggaattaccatagcatacttaatttttgccattggtcgttctatggcgtttggtaactccgttgcctatggtttaaaacatatcgaccaagaacttcaaaatgacgctaatgcgctatataacaccggtcaacaggtggcaggtgcgattggaacgactgttttagcgttaatgatgggttcagttcatcatccaggttacaccagagcccaaaatatcagtgcgggcagtggatgggcgtttattctacttgttattttaggattaattatcttgggcttctttcatcgattggtaaatttagataagcaaattaaacagacgaattaatcgtgaagttgtataattaaaattgtattataaaataaggagaaaactatggctaaaattacgcgtctttatgatttatttcaacccgaacactacgatatatttttagatatcagccgtgaaactaagcattttcgtggtaaaacgatcattcaggggatagcccagcagaccgaaattgcacttcaccaaaaggatttagaagttaaggtggtttatgttaatgatgagaaaacgccttttgaaattgattcagcaaatgaagtgattcgtctgcaactaagtcaagctggtaatgtaactttgactgttgaatacgaagctgaactaacggacagcatgatgggaatttatccatcatactatgaagtcgatggagttcaaaaacagttggttggtacccagtttgaaacaacttttgctcgacaagcctttcctgggattgatgaaccagaggctaaggcaacttttgatttagcaataaagtatgacgaacatgatggagaaaccattttaagtaatatgcctgaaattaaggtagtcgatggaattcattattttgatacgacggttaaaatgtcgacatatttaatcgcttttgcttttggagatcttcaaagtaaaatgacaaagacgactagcggcgtgcaagtcggagtctttgctactaaagctcatcaatctcaagaacttgattttgcacttgatattgctaaacgttcgatcgagttttatgaagaattttaccatacagcttatccgttgccccattcatggcaactagctctacctgatttttcagccggagcaatggaaaactgggggctagtaacatatcgtgaagcctatcttttattagatcctaagaacacggctctagaaactaaacaactagtggcaaccgtcatcgcgcacgagttagctcatcagtggtttggtgatttagttaccatgcaatggtgggatgatttatggttaaatgaaagtttcgccaatatgatggaatacgtagcaattgatgcgattgaacctgattggcatatttgggaaatgttccaaacgtccgatgttcctgcagccttacagcgagatgctactgatggtgtgcagtctgttcatgtgcagatccaaaacccagctgagatagacgctctatttgatggagccatcgtgtatgctaaaggagcacgtatgctagtaatggtgcgggccttgattggcgatgaggctttacgtaccggattgaagcagtactttaataatcatcagtatggaaatgcgaaaggggcggacttatgggctgctctaggagaagctgcggggattgatgtcggagcaatcatgcactcatggttagaacaaccgggttatcctgtagtgaatgttgaagtggtcgatggccaattaactattagtcaacaacaatttttcattggtgaaggacaaaatgcaagacggcaatggcaaatcccattaaaaggtaactatgaagtcgttcctcaaattttagatcaacctactttatcgttaggcgattatcaacagcttcgaaatgaaaatgggcaacctttccgactcaacgttggcaacgaatctcatttcatcgtccattatgctaaggatttattagcggatatcttgggagcattggaccaactaggagcaattgatcagctgcaaattctccaagacttaagattattagctgaaggaaatcaaatttcgtatgctgaaattgtaccgctactggaaaaatttgctgatagttcatcagcggtagttaacgatgttttatatcgcttggctggtgatttgaagaaatttgttcagcctgatagtgaagaagaggcgaaccttcaaaaacttttcaatcaacttagtgcaaaacaggtacaacgtttaggttggaaaccaagggccacggaaagtaatgatgatcagttaactcgaccttatgtattaggagccgcattgtatgcgaagaatcctgaagcaattttagcagcacatgaactttttgaacaaaatcaaaatcagttatcaaacttgtcagccgatattcgtagttatgttttgagtaacgaagtgaaaaactttaataacgaacgactatttaaccaattaatggaacagtaccgtcaatcgactgatccaagttataaagctgatttaagtagagcactcactgctactacggatgaaaagcaaatcaaagctattattgaaaaatttgaggatgctagcacgattaaacctcaagatttgcgagcttggttccgaggtctattagctaatgctaaagggcaacaattaacttgggattggattcgaaatgattggaaatggttggaagatactgtgggtggtgatatggaatttaataccttcatcacggtgattgctaatatatttagaacaccagcacggttggaggaattcaaagccttcttcgaacctaaattgcaaactccaggcttaacacgtgaaattacaatggacattaaagtcattgaaggtcgagtgaagttaatacaagccgaaaaagcagctgttaatacagccatcgaaaagataattgcataaaataaaaaattcaaccagcgtttaacgacgttggttgaatttttttgtttatttaatattttgaatttcgctagcgtggtcagataaatcaccaccggcattttgaacgactccattagcgtagacataatatgaaccatcatggtcggaagtaacgtggaaataaataggggaggatttaccaacggaactataagctactttccaacccttatcgccatatttggctttaactagattgatggccgcctcagaagtttggatagtttcatcagctaacggttgatgattattttgttgttcagcggctgttaaatctgcacgacttaggttgttagaattcgttttatttgagctattatggttactttcagacttactagaggaactaatagcactattggaagctttggaagtagaactacttgcgctagcaacgcttgatgaagtttgatcatccttagctgaagatgaactatcagaacttgccttcgaagatgatgaagcttcttgatctttcttagaactagcttttgagctagcctttttgctaaccttttctgttttagaagtagcatttgaagactgagaacctgaattttggtttccagatccgcagctagcaagcgtcagtggaaccaatgctaaaagtgcgattgaagcaatttttttcataataaaacactcccccataattatttgtaaatctcaataatcctgctttgattctaacacatatggtcattaccttaaaggaggttaaacactgtaaaaatggtgttgtaaacgtttaaaagtattgggaggaggtgtaaaattgattatagtgaaattaaacacataacacgaacggtggaggagtaaccatggaaaaagtaccatataatattggtctcgatattgggacgtcatcaattggttttgcagcaaccgataatcttaacaagcctattcgggcaaaaggtaaaaccgtcattggagtacgattatttgaagagggtaaaactgcagctgatcgacgtggatttagaacaacacgtcggcgattatcaagaagaaagtggcgtttaaggttacttgatgagattttcgataaagaaatggctaaggtagataataccttttttgctcgtttgaaagagtcgaatctttcacccaaagatgctaataagaaatatttaggatcattattatttccagaaaagaaggatttcaagttttatgaagattatccaacgatatatcatctacgttatgctctaatgcatgaaaaacgtcaatttgatattcgtgaagtttatttagcaatgcatcatattatcaaatattgtggtaattttttgaattcagccccaatgaattcttttaaaacacaagattttgattttgtggctaaatttgaaaaattaaacgaactctttgaaagtattgatgcggaacatgaaacgaaatttgatattgaaaatatttctaagtttagagatatcatgctaaatcaagatattcgtaagttagaccgaaaaaaacaagccgctaaaattttaatcctagatagtacagataagacggctaaaaagattaataataagtaaccttcactattaatctttgttcctaactcaaaatcttctgtaatcgtatccgtcggaaatcctccaactttatcaacaatttctcgcaagaaaactgcgtttgatcccgtaaacaaggcatgtccattagaaccatttaacacattgacgtcccgcgaaaagaaatcctgttcatttactacagcatcttgcaaaaagaggttaaattgaaaaatatctgcattgtaaaaactttgaggagtctgaacaaacccaattggcttagtatggtctggatcctcttccaattccgcaaaattttctgtaaaaaatgggacactactagttaaaaaattagaaaaaggcatcatatctgcatcaaaaatagcaaataacggcgcatctaactgttcaagcgcattattaatattccccgctttagcatgcttatttttttccatcgtcacatagttaacctgatattctttagctcgttcccgtacttctggacgatttccatcatctgcaattacgatgttaactttacttttatcaggataatccataaaagttgctgcattgactgtttttcttagcaacgaaacttcttcgttatgcgtaacaataattacgtcaattttaggaatcggctgttgcaaatcaaacttaggaatttctagtttttgggtcttatctgctcgaattaatctaaaaataatcaatacataggcagtaaaactagagaagatttcactccctaccagcaataaagcaaaaatcaaagtaaatatgtgtgcgtgccatgaaatggtaaaaaatacacgccaaaacaggtaaattactgatagaacaattgctaaaatataactaactttcttgatttttggcataattcacctcagtatcttttttaaaaataaagtctttttgaatttggtaactaatgataaataatgtgaagtcaaccatcattttggccaacatgggggcaatgctatttccattatgtggtaaccaattggtaactaagtccgttagataacctgaaaggatcatctacactataaataaagccccgtatttaatgaaagtttgccgcccacctccattaaaaacaacgcgatgattcagcgtataattaactaccgctgaaagtgctctagaaataactgttgctaggataatactatctaacacatggtttcccattagtaggataattccttcaaaaagcgcaatatcaacaataaaagaaataattccgctccctgcaaatttaaagaaacgggcatagattgcaagcgagtctcgaaccactcgaaaatgagatgacttattaccatccaaataaatggttggaatgggttgctcaatcacttttacatcatatttacgcgcctgaagcaacatatcaaattcgaactcaaaacggtctccaggaaattcaattaactgatctacatattggtgaggaataattcttagacctgtttgtgtatctgagatattctggtgagttaacaacttcactaatttacttgttaagacatttccgaattgacttcgtgcgggaatttcgttagtaaatttgcgaactccaataatcaagtctgtgggattttcttcgaacttctccatacatgagcttaaagctcccacggtatgttgtccgtctgaatccattgtcgcaatcccttcgatttctggaaaatagttgcggatataacggaaaccatttttcaacgccgcgccttttccttcattatgttgatgatgtaaaacatgaattcgctgatctccaatttcctcaagttctttaaaaacagcttggttcgtgaccgcactgccatcatcaaccaatactagcgcatcaaaattaatcacattatttaataattcatggaccaatttaattaacttttagtccggatttaaagctggaatcaaaattccatattttttcataatttcacctattatttaaactcaaaataaaaattttccaccctatatcatggtacactctatacaccttgaagaagtgcattaacactcaaatgtaatagaagtgtaaaataaatcgttttaccagtataaaacacaatccgtttgtacattatctttcaccctagtaataatttacgttgtaaataaccagcgaaaacccattatacttaacttgtttgactaatgcaataaactttgagacgtaaaaaagttttttattgaaattaattttaaacaaaacatatctaaactagaaaaatactatcaatgtctaagttatggtatcatcgtaaatgtaagcgcattaacaaacaaaaacggcggtgacttaaacaatggatttaacaattgtacgacatagtattagtagcgataacggtcgcggattaatttcgggggctggttctgatgttgatctttcagaagctggaatcgagttagcccaagaggctcaacgtgcttttgactggaatcaatttgatcaagttttctccagtcccatgcgtcgggctaaacaaacggccgaattactcttaggtgaccaagcttcagcgattaattttgatgaacctttaactgaaatgaattttggagactgggatggaactgccgaagacgcaatttttgaacaatatcctgaaattttcaatcaaatggggatgtttaatgagaagtattccgattatgcacccaattcagaaagttacgatgagctggttaaccgcgtaacaggctttttagatgaattgaagcaaaaatatccgactgcatcaatcctactcatttgtcacggaatgactacgcgagctctctttgctgccttactccacgtcagtcctgcccaatttggtaagattggcaacgttactttaaatcaaattcatctagatgaaactaatcattttgaaccccgcattgatctttacaatcaaaaattaaattaaaaaacggattgaagcctccaacatcatgaaggtttcaatccattttttgtttacacactagctttcgaatttagatatttcttttctgcttcctttcgggcctgaacagcgtcttcaaagtcagcaaaacttgaatttaaaactaaactacccttaaccatcatcctagctaaccatctttgagcatggttatcaaatgacacaccgattaccccgctggtatttctagccccaattttaatggactgaatgggatttccattaacatcttttaacgcatcaatatttcccatcctagctaaagtcgcttgattagctcggatttgataggctgctttttcttttcgtaagcatccacaactacgtacgctaccacgacgtaggcgataaccatccgcttcaataatgtttccacatgtacactgacaaacccaaaaggtgttacctgcggcactcttctttgatgcaactcgcaaaacttttaatctactaaattgttgcccagttagatcatatctaccccgtgagcaactaccgcaacttttagtgctacctaccttcaaatgctgtaactccacatctgtttcattaccacaatcacatacacagtgccagattgtattaccatttttagctttgccagaaggatacttggcgactaacttaccaaatcttttattagttatatcaatccgaattttcatgactaacctcctcatctggggtgtgcattatttaagccaaaatacacataaagttgtattttgaaggtacaccctaaaaaaacaattaattaccttatatttttaaacatatcaatagaatagttcagcacctaaactaagtatagctcaaaatgcttatcgttaaaataacttttttatacgatacagtttttgagtgtttttacgaaaaagtaattcttagatttcatttttaatccgataaataagagtccgactggttccagttttttgactaatactggtaattttttgaccagcatttaacatttcaatgatttaaaaatatgtttttcgtcgcgcttcatttttaacatctggtccaaaaagaactggacgacctttataaacccctcgctttttggccaattcgattccctgacgttgtcgaattcgctttctttccgactctgcttggaatttctttgtctcgataaaaatgtttcgtaagaaattgcgcatgtttgcatcatcaatatcatcaaaagtaggcaaatccaaaataactagtttggcaccttttaaataaacttccataaaaatgtgagtaagatattcattgtttcttcctaaacgttccatctcgataacgtagagctcgtcgcccggtttaggatgctttaaaaccttcatcaattccggacgttcattgattgctccagatattttttcttcataaatacgatccattccaacttattttaaacgttgtagttgacgtgccaagttttggtcctgcgagcttacccgagcataaccatatttcataaataaaacctcctagattttagacctttaaatgtctgttttttagggtgtaccctaaaaagcatggcatcatatataatattgcctaagcggtataatttttagcgttaattagttttatttatttctattaacgaaagaaacctttattttattataaaatcctcttagaatgaagtaatttagactatctacatcctgattcaataaaaatagggttacgacatatttaaatacgtcgtaaccctatttattttgtaaatttgttaattaaagttccgttagtgcgtcgtcaacagtttgcccaccatcactcatccggataacttttttgattgtattatcatgtttaagtaaggctgccaaaacctgagcaacgtttggaatagcattttgcttaccactaccgttgatggatacttttccagtaccttcttcttcagtaaggctagcaggttgtaaaatagtataatctaatttggtattagaaattaaataattatcggcaaagaacttagcgatattataatcagttaaatctgctaatccttcccgatgccattcctggggttctaatgaaaacattgagctgagcatgataaatcgtttaattccatttttttctgcagcttgcataacttttactgctccaaaggcatctgtctgcaaaaggtcctttccccgagaacctgctacaaaataaactgcgtccacatccttaatgcttttggtcatttcatctacatcgtcatgtaaatcaaaatgcactggagtgacatgttctaactcaattacacgttcaatctttctggccccagctactacttcatgaccatcactaactaaatccttaattagatgctctgcaactcgaccagttgaaccaactacaaaaattttcatattctgcctccattattaacttaatctactgccattatacaaaagatacgaataatgcgttggagagacgatttatcttctcaagctttatcaactggatggagcaaaacatcatttgatttaatttctattgagcttgcaacgtataatgctcaccagtcgcattcaatttgctttcaactagttcttttaatttttcaatggccaatttcgcacgttgagcttgatcggcattaattgcttcaatcaccatgacagcatcagttgtatcttcagttaacatcgttctctgggcttcacgccaattaaaacaacgacaaatcgcaccagttgcatcataataaattacttccccaggtaaagctggttcatcttcatctgagcctaaaggacgaaaactttctcctccctttgccgctcctagatgcatggttccatccattttttgtaagtcttctccgccacaaggaaccccgtattccaatgaaatactgttatagatgtctaccaatggattaatcggacttaatgactttccttgagacacgcgttttaaaagtgcttcaatcgaagcccgcgccccttttttcttcttaaatttagtaaaagcagttcgccactcactaacgactgggttatctcgaaaaacatcattagcaatatacttttgtgatttttctattgcactatctaataattcccgataaggttcatcggcttgagaccggttattaatccctttaaccaccaaaacttcaaaacgcgcctctggaaacatttgccaaatttcttcatccattttcaatgcttgcatcattaattcctcctttatgggttatccttgcttattatctatcaaaataggtgcaaatgcaacaaaaacattggcaaaaaaaagccccaattcaaatcgaattgagacttcttgaacttaactaaaattagttaagctttgtcttgctttgtacttcaagcttttcgttgaagtcgtagacaactggttcaccagtagccatttcaagattaataatatcttcatcagagatattttcgatgtacttgctcaatgcacgtagtgagttaccatgtgcagcaataataacgttcttaccatcgattaacttaggagcaatttcgtcttcccagaaaggaataacacgttcaagagtaaccttaaggttttcaccgccaggaatgatacgtgggtctaagttagcgtaacgacgatcgtttgctgctgaaccttcatcatctgcatccaatagtggaggaagaacgtcgtatgaacgacgccatgtgtgaacttggtcatcgccccatttttcagctgcttcagccttgttttggccttgaagagcaccataatgacgttcgtttaagcgccatgtctttgtttcaggaatccatagttggtctgaaccttccaaagcatagtgcaaagtcttgatggcacgagtcaatactgatgtgtaagcttgatcgaattcgataccagcttccttgattaacttaccagcgttttgtgcttgtttaacaccttcgtcactaagatctacatcaacccaaccagtaaattggtttgataagttccattgactttgtccatgacggatcaaaactaattttgccatatcgtttaaatacctctttcttgaattaaatttctaacattacaattttacaatttttaagcgattagtacaaactgaaaatgaagaagtttccacaaaaagccgattaactagctaaaaactattcttcaatggtatcacttataggaatatcttcattttcggttgaccttgattttgtcttagaggattcagctttagacgaactaccagtctgttcattttttttagtagaactgttctccgttgcactactgctggatgactcttttgcattagacttagctgtttttttagtaacgcttttactactatttttcttactaggaaccgttttatctggcacagctgcagatgacggaattggcccgccataacgtggtagaccctgttggcccgatcccgattccatactattctcgttattatccggcgtcgtatccgtattaaatgaattttgatccgctacaattccagcgttattaaaacgctgaagcactagggcttgatcataaatcgtcttgtaatactcttttgaaaattctttatcgcttaagagcccatcaatgattgcattagatccgtaaaaatcccaagcttcatttttttgcttagctgccgttaattttttattgaattttttaacatcctgcttaattttatcaattaatttaactttagtttcgctccgctgctttaaagtggccgaagcctttttataggtgagcacagtttgataatccccacgcgcactagtaaattcattactcttaaattcagaacttgctcgcatgtacattttcgtttgtgccagtaaattagcagcttgttgatcatctttcctaatggttatggctcgtgaaaaatagtttttagctgcagtgtaattggtctgatcaattgctgtttttccattcgtgatattgcgctcatactgtacttgttcttcgtgataatgagcgactgcatatccgccaacaacaccggcgaccagaaaaattaacactgcccaaatccattttttcattgcctaacctcccttatatatctgatttattataccacgtaaatagcatttaacttactgcttagtcttgaatataatgcttcacatttgaaaaaaatgtcaacaaagtttataacagtaatataactcttttattttagaaaggatctgacacaatgcttgagaaacaattttacaaatcgtttttaaagcggacatttaacattccagtacgcgtcaattactgggatggaagttctgcagtatatggaacgggggatcctcaagtcaccataacctttaataaggccatcccagttaaagctattctaaagaatgcttcgattgcactaggtgaggcctacatggacggtaccatcaccgtcgaaggtagtttacaacaactaatcacatcggcatatgaaaatgccgatagtttcttccataataagaaatttattcattttctccctaaacaaggacataatgaaaaagaaagtatggaggacgtccaaaatcattatgatattggtaacgacttctaccgtctttggcttgaccctaccctgacttattcgtgtgcttattttgaaagtgatcaagatacccttgaacaagctcaaatgaacaaggttcgtcacattattcgtaaacttcatccccaacgtggtaaaaccttgcttgatattggttgtggctggggaactttaatgctcacagctgctaaagagtttgatcttaaggtggttggagtaacattaagcaaagaacagtacaatctagttaatcaacgtatcaaggacgaagggctcgaaggagtagctgaagttcgtcttcaagattatcgtgaactgggtgatgctaaatttgattacatcactagtgtaggtatgtttgaacatgttggtaaagaaaatctcggaatttactttgaaaatgtagcaaaataccttaaaaacgatggagtagctttaatccacggcattactcgtcaacaaggtggcgccaacaatggttggttaaacaaatggattttccctggtggatatgttcccggactagttgaaaatatcgatcatatcattaatagtggtcttcaaattgacgatatggaaccactacgtcgtcattaccaacggacaactgaaatatgggacgtgaacttcaataagcatcgtgctgaagttcaagaaatgtttgatgaacggtttgtgcgcatgtgggatttatatctccaagcatgttcagcatcatttgaatcaggtaatattgatgtcattcaatatctcctcactaagggtgctagcggacgcgttctcccaatgactcgtgactacatgtatgaaaaataaaaaaagattcatgccgaagacaatagttagccttcagcatgaatcttttttgtattaatcgttcaacctataagctatataaaaaacacgctcatttcaacgaatgagcgtgtttaaaattgcattttacaatatttattattaaattattaacgttaaaatcattactgttacgagccctacaataactgacatcgccattgagcgcgtccaataggcaattagaataacaactagcccaccaataatcaaggcaagatttccactagtaactaacgtatatttgcttgaaataaagattcctttgacaaccaatgccgtaaataacgaaattggtacgtacttcatccaatcgttaaaccactctgggatttggcgctttgaaaagaatagtagtggtaaataacgtggagcaaacgccacaaagaaaccgagaataataatcaatagatgatctaatgaactgtactccatgcgtgatttctcctaccaaattaaagaatatctgactcttttttttcgatttcttcgatgattggaccacctttacgtgaaccaatatcttgtaataatgcactcgctggtcgtttttttaatagtaactcttcgattaaaaatccagtaaatgacgcgatcaaagttgatgccacgagacctaaggtactcttagttataatcatacatactgcagcaagggcacctgaaaagatacaaatcagcaatgaaagtcgagatttaatttgcatcacaatcatatagataaataaggcggtcaaagcaaaatcaactacagttagattaatactaagcacactaccaatcaatgaacccacaatattagaaacggtccaaaaaaggagtgaccagtgctcaacttggcgagcatcattaggggtccagtgtttatctgttgcaaattttaaatagtttacagcgtagttttcgtcattcaaggaaagagcaaatgtaaaaatcgaactacgactctcaccttgtagatatttcgataaacttgaacctagcaatgcgtatcttaactctaggaagaagagcatcaaaacaatcgtcaggataggagcgttaactgttaacatttgcgcaatcaaaaattgggccccacctgaaaaaataactaaggaaactaatccagtgagtaacgtattgaaaccagcagcatgtaatagaattccacatgctagcccaatcggcgtgtaacttaaacaaagtggccacgctactttaaatgtttctttccagcgcgcctccgttttaatttgtttcaaagtttgtcctccaaaaaaactagatataaaaagaatacattaattttttgcaaagcatacgaattaattctaacacgctaaataaaattttaatagtaaagccactaaatatccctctttaatcgcgtcctttaactaaaccaatcagctatagaacgccccaaacgaacaaaaatattagcttttttcacatcttgagttggtttcaatttcacatgtacacctttaccattttcaaggaattggtcctgattgcctttaacattcgccgtcgcaattaccttagaatgtttaatgggtgctttttgttttggatcatttaatttaattgcattgacatgcagtttttcgctccgaccttttggaacccagtaatctagcggttgggccagttctaatttaacatccgcaactttagctgagttaattttaacagaggcttgattctttaaattggaacttaaaacggccaacttagtcatcaacgcattccaaatcgttttagtatctgtgaaacgttgattttcactggaacctaatacgacactgattactcggtgacctttaattttaccggtagcagaaaaatcctctccggctttatctgatgtacctgtttttagaccatcaatttggtattttgtttcatactgttccgcgccttttagtagttcattatgattagtaatttcaagttcttcttttccagtattaaaagttgttttttggattttagtgatatttagaatctcagggaattcttttaagacatgggaaattacgattgccatatctttagcagacatttcgttttctatatttccagatgtgccagggtacttttcactaccaacttgactttctaataatcccgccgcgttgtacaattttgcatctttaataccccattttttcacggttgcccgcatttcattgacaaatttttccgaagttcctgcttgggcttttcctaaagctaaaattgccgcgttagctgaataaattaatgatgcatctaacaagttacgcactgtgtaggtttgattggaagaaagcagaacgttggttaattcactgttgttactaacttcttccaagctcttattgatagacactttttgattccaatgcatttggccctctttaacgctcttcatgatgaggtaagctgccacaatcttcgacattgaggcaatcggacgaactgtgttttcatccttgctatatagaatctggcctgtgttttcatcaactgcaatcgctgatttagcagtgatattactagtggttgcttcaataactgattcgttattttcagcagctagcgctggcgcaaaactcgtcatcatcattaaaaacgcaatcagcatcgtgtataattttttcataatctaactcctgatccgaataaaaaagactgttccaaaaggaagtctatttttcaatgtggtaactaacaagttaatctcttaaaatttagtcaccacaattgaagcgtagctctttgacgaatagctctaaaccatccttcaaatctttcatcacagtctttacatcttttaaattttctatggtaagtccttacttaccggttgatgcaatggcaactgaatcacaaagctcgttcgcttatcgttcgaatgagcttcgatagtaccattatgcatttcaacgatgctttgagcaatagctaatccaagtcctgttcctccagtggctttggaacgggaaccttccactcgataaaagcggtcaaaaagcttgccaagggcctcagcaggtactttttcaccatcgttagcaacttcaaaaattaccgtatcattaatttgtttggcactcaaaaaaatatttttaccaccattaccatatttcaaggcattggttatcaaattgttaaacacccgaccaattttttcggcatccccggtaatttctaaatctttcggcgtacattgagaagtaatcacaaaatgcttctgcttagcttccagttcaaaactagctgctaactgttgaagcatagaatccacattaatcgtattaattgtcaaatggggattagattgactaaccttggtatattcaaaaaggtcctctaccagtgatttcatctgaattgattttaaatatgctgtatgcgtatattttaaaatgtcatcttcatttttaaattgacgatcttcaattaaccttagataaccaataattgaggttaatggcgtacgtaaatcatgcgatacattggtaattaaatcatctttagattgcttaagcgctcgctcttcttccatggagctaatgacactgtcaaccagtgagttcacactatccaccactcgttgatggtctccacttaattcaaatagaatacgatgatcaaaatgaccattagcaatgtaatgtaattcggcaataatatgacgtaactgcatttgcttgtaacgtcgttctaagcgccaataaagtacccctgcatcagccaaaaacatgattaaaataaaaatcttttggtagctccaaatctgtacgccgccaattgtaattgaatttttaaccataaagaccgcgtttgacaaagctggattcgactttaaggcactatcaattaagataaaaactgataaattgagtaatagtaaaagaattaccgtaataactccttcaccaaacaattcatatttttcacgccccgttaacttcatttgaatctctcctagtgcgcgactactttatatccaacgccccagacggtttcaataaccttttcaccacccgtagcttcttcaatcttgtcgcgtaaatgactaacgtgtaccattactgttttagctgaaatcacactctcctgttgccaaacacgttcaaaaatctcatctgctgagaacacccggttaggatggctagctaaaagatataaaataccgaattcaagtgctgttaattgcacatcttttccagctaaggtccgaacttcatgtgaatcactgttgatgattaatgaaccaatgtccaaaatttctggttcatcagctgtcatatctttttcactacgacgtagaagtgattttacacgagccatgacttctagtggattgaaaggtttagctacgtaatcatccgctccagtcaagagccccttaatcttgtccatatcatctgttttagcagacaacattaagattggtagggatgaatccttacgcacttcccgaaccacttgcatcccgtccatttccggcatcataatgtctaaaatcattaagctaatatccggatcggtacgtaatttagacaaagcttcttttccattgtaagcagatactggttcgtaaccttcatttttaatataaatgtctaataattcaacaatttctttatcatcgtcaacaactaaaattttcattggtgaatctcccctttttactgtcttttttaccagtctagcaaatttcgttcaaaacacccgttactagggctggattttattaatctttaagaaaaccttccattttcagcagtttttcttttaattcaacccctgcccgataatttccaattttcccatctttacgaatcacgcggtgacaaggaatgactagcaaaatcggattacgtgccactgcactagcaacggctcgaatggctttaggtgtttctgctaattctgctagttccgtataattaacccctcgaccgtacgtaattttcgttaatgttttccatatcttttgttgaaactgggttccattacttagatcaattgctaaattaaatccttggcgacggttttcaagatattctttgatttgacgtacagcttcgatatttgatttttcatcttcaattaattcaattgcttgataaaactgatttacttcctttaacgtttggttcggtgagccgacaaaagctaagccctttttagtcgatgccacatagtacgttgcatctttcacttgaaatttagaataatatagtttcatagcatcaccctccttctaattttaacctgtaatcatcgtaaaataaaaaaagttaatagccaaggacgaatccttgaccattaactcttaaagtttttaattattcaataccaaattgaatatttatttactatttatggtagttaggagcaattttagtcatttgaacatcatgtggatgggattccactaaaccagcgtttgtaatttgcacgaactgtgctttttcagccaattcagcaatggtagctgcgcccacgtaacccattccagaacggagtccaccaagcatttggaagatgattgtggcaactgaacccttatattgtacccgcgcttcaattccttctggaaccagcttattggcttcatttacgccaccttggaagtaacgatcagctgaacctttttccatggcgccaaccgaacccattcctcgataggctttgtatttcttaccattatcttcaatgattgaaccaggagtttcgtctgtaccagaaagcatgctaccaagcattactacatctccacccgcaactagggctttaacgatatcaccagagaacttaattcccccatcagcaataatcttcttgccatattcacgagctacattagctgcatcatagatagcggtaatttgtggtaccccaactccggcaactacccgagttgtacaaattgaaccaggtccaatcccaactttcacaacatcaacaccagcgtcaaacaatgctcttgttccatccgcagttgcgacgtttccagcaatcaacgtttgctttggaaaatgttcgcgaatttctgctaccttacgaagtactccggctgagtgtccgtgagctgtgtcaattacgatagcgtcagcaccagcatcgattaaaccttgagcacgttcaaaagtatcactagttacacctacggcagccgctactaatagacgaccttggtcatctacagctgcatgcggattgtcttccagatttacatccgcattttttacgattgaaacttcggaagcttgttgttcagcactcatatttttatgaatgacacccaagccaccttgacgagccattgagatacccattgcagattcagtaactgtatccattcctgcactaataatcggaatattaagcttaatgttatcagctaattgagttgaaacatcagcctcattcggtaatacatggctttcgcctggaattaataaaacatcatcaaaagttaaaccttgttttgtaaacttgttatcccaattgctcatcattctctcccttttctttaactaaaatatgccaccaacgatatgaaactttcgtctaagataccaccgtccgccgaatgctgcaaccgctaatattgcatatccgtagaatggaagggtcggattgataacaggtggtagcattccaaagctagtatagaagataatccaaaggactacggcaattacgacgattcccgcttgtttccatacggaagggcgctttttactagatcctaagactttgtagatataacccataccaatcccaccgactgctgacgttaagataattgctagcaatcctgaaggacctggtgtgctagtaatcgtcttgggttcaattaacatcatgattgcgtacattgcagcaaacagagcggcaaaaattaaaccattatctaaagatctaatccacatattgttattttgggcttcaattttagctttcttaggcccttctacaatttcatttaatcgttgggttggggtaccaaataattgtttagctgttttaccagttttttgagcttctaataaccgagtttcagtatcaatcaaagcttcgctacgttgttcatcgttaagcttgctttctttaagctcttttcgtaaacgatacataaaatctgcattacgtttagttaattcttgttttttaggttcattttcatggtgggcaactgaactactttgcttgccctcattacgtggttcttcagtcataatctatttactcctcgtttgatttatattagacattaaagcggaattcgataatatcgccatcttgcacaaggtattccttaccttcaagacgtaaacgtcccgcttcacgaacaccttgcatactgccatacttgtctaaatcatcaaatgaaactgtttcagcacgaataaatccacgttcaaaatcagaatgaattacaccagctgtttgaggagccgtcattcccttcttaaacgtccatgcccgtgtttcttttccacccgccgtgaagaaggtttgaagacctaaaaggttgtatgaggcttgaattagacggtttaagcctgactcagtaattccttctgcttcaagaaattccgctttttcgtcatcttctaattcagcgatttcttgttcggtttcagctgaaatacccaaaacttgcgcatcagggtcttcttgagcaacgtaatctttaatttctttgaagtacttagaagcttcaggatcggccatatcgtcttctgcaatattagccacataaagtacgggcttagtagttagcaagaaaagtcctttaacaataggcatttctgattcatcaaaatcaattgtacgggctgctttaccagcttccaaaactggatgtaatttttccagtaccgctaattctgctactgcatctttatcgcgtcccttagccgcacgctgtaccttagtcaaacgtttttcgacactttccaagtcagctagactcaattctaagttgatggtttcgatatcttcgatggggtcaactttacctgaaacagttgtgatattgtcgtcgtcaaaggctcgaacaacgtgaacaattgcatccacttggcgaatattttcaagaaatttatttccaagtccttcacccttacttgcacccttaacaatccctgcaatatcggtaaattcaaaggttgtgtgcacaatctttttagcaggaataatttcttgaatccgatctaaacgttgatctggtacttctaccatcccgacgtttggatcgattgtagcaaacggatagttagccatttcggctcccgcctttgtaattgcgttaaataacgttgacttaccgacgttcggaagtccaacaataccagctgttaatgccattttaattccactttcctttcaaaactgcgtgttcttctctatatattatcaaaaattaggggtcgttaacagaccgttcagagccaaagttgcgctttcatcaccatcaataaagaaatctcgtatattacagttctattttttgattttagttagtaaaaaagaggcactacgatttgcaacttaaaattggcttatcataatccctcttacaacttattcagcgtgttcaacgaccttcttcaattttcgttcaaattcacgacgaggcaacatcacaatgtggccacatccctcgcatttaatcttaatatccatccctactcggatgatttcccaagtattagagccacacggatgacttttcttcatctgaacaatatcatgtaattcatattccattactaaatcctccttagtctaaagaaatattcaagacatccaaaatccgatcaagttcttggattgaatcataattgatttcaattttacctttttgttttgattttgctacaaccagtgcgcgcgtcccaaagcgttcccccaattgattttcaagttctcgaataaaaggtgatttgttctttcgtttttgtttttgagctgcttctcgatctttatccaaattaaatttagttacgatttcttctaattgacgaaccgttaatccctcttcgaccgtccgttgggcaagtttctctaaagcctgaggttgcttaattgccaacaatgttcgtgcttgtcccattgaaattcgtccctcttggagcatcaatttaacgcccgttggcagtcctaataaacgtaaataattagcaatataaggccgactcttacctaatcgttccgaaacctgtgcttgagttaaatttaactctttaatcattgcttggtaagcttctgcttcttctagcggactaagatcctcccgttgtaaattttcaataattgctgcttccatagtggcttcatcagaaaagttccgaataattgctggaacttgttctaaaccggctaacatactcgcccggtagcgtcgctcgccagcaataatttcataacgttctaatgcagcaattggttgacgtagaatcaaaggttgatagataccagatttttttatcgatttagccaattcttcaagtcgatctttatcgaagatatgccgcggttgaaatggattaggataaatcttagtaatatcgatcatctgatacgttgcgtcattttgtgtgttcaattgttcatttaatactttcttacccatcatgataaccttctatttcttgccaattggatctttacctggtgttccaggtttacgtggatacttatttggtgtttgctttttcttttctaccactactaaatggcgttcgtcaccagtcgcaggtagcgcaaaatccttgtccacgatcagcttaccgcctaaaatggcaatggccattttcccatctgaaagttcttgttcagtattggccgcttttaaggcaataaaaaatccgttttgtttaaccaacgggatacacaactcactcaagacactcaaacgtgctacggcccgagccgttacaatttcaaatttttcacgataaacggactttttagcaccaaaagtttctgctcggtcatgtaccaaagtcacatcggttaattctaattggtccaccaacgttttcaaaaaagtgattcgtttattcaatgaatcaacaatcgtgacttttagtgatgggaaaagaatcttcatcggtaaagaaggaaatcccgcccctgctcctacatcacatagttcagctcctgatttaaaatattcaggcgcctctaataggggggtgactgaatcataaaaatgcttgaggtacacttcattttcttcagtaattgccgttaaattaacatgttcattggtttcaattaacattttgtagtaggtagcaaactgggccatttgatggtcactaatttgatatcccttatcttctaaagcctttttaaattcttctggggtcatgtctgttctccttgtgaaacattaattgtttcatatcttatttccactttaactaattagtaaagatttagcaatattgtgaacacatttgtagtctaaagttggtcgtattaactagcaggaggatttagttttgactttagttatccaaaaaatcaatgcttatagacccgaacactacaaattactgttagatgccgacccctcccttagaagcattgccacctatttatctcgaagtaccgcgttcgaattgaccgaccagcaccagcccgtgggaataattgttgtcatgcctaccgaaccgctaaccgctgaaattatgaacgtggccgtcaaacctgaattccaagaccaataccttgggagtcgcttaattcaatttgtggtagattattttaacaaagaccctgattttacggctctaacgattaaaactggaacaactagctttaagcaactttatctataccaaaaattaggcttccgctgttctgaaattttaaccgattattttaaaaatccagaaatttatccaaatgatatttacgaaaataaaatgctattacgcgacgcaatcttgttaaaacgagccttaaaggtttaaaaaaatcccatgatgattggcttaggaaaaactaagctttaatcatcatgggacttttattcatttaaattaagcattcatctttttaacttcttcaataaaccaggcattgaaggcgtctgcatcaatatcaacacacacttcagcattggtctttccatcgtggtaagctcctcggatatctgcaacggtttcaccattcgccggtccttcagtaactacgtcaatccaatatgggatggtcttatacatttcgggttttagtaagtatgccaacgtattaacatcatgcattgggataccaccttcatttccctcgtaatagtggttaaaaatggctcccagcatttctccagccttacctaaggattttactgtgtctaacgtagattgcgttagaagagctttcatcgttacatctaggccaaccattactactggaatgccactcttatataaaatttcagcagcgtggggatcagtaaagacgttgaattctgcagcacttgtcatatttcccatgccaattgctccacccatggccacaattttttcgatcttggtttttacatcgggatgttcagtaagtagtactgcaatgttagtatacgatcccgtgggtaccaaaacgatcggttcatcgttagccataatagtgtgatataaaacatccactgcattgttaactggaatgttagtgggttctgcaccaaaatcgtaaccaggcattccagattcgccgtgaactcgagcagcatcttcaaatggtttaatcaaaggttgttctgccccaccagcaaccggaatatcagcgttgaagaattttactaatttcatcgcattcttagtagttttatcaaccgtaacattcccagccaccgtcgtaattaattctaattcgatttcaggattattgatggccacggaaatcgcagctgcatcatcaattcctggatctgtatccataataatttttgttgtcattttcttacctccagcttttatgaaagcgtcctcattaccattctaaaaaagaatgcacgttacgtccattctttttcactatctatttaaattaattaataattaactgttaaaaaagttaccagacgaacacgcctacaaatccagctgatagtaatgaaactaaaataccggaaagaagcatgtaaccaacattcttagaaattgcatcatttctttcacgatcgacaagacccttgaaagcaccgatgatcatccctgtggttgagaagttagcaaatgaagttaagaagacggtcaatgttgcagcaaaatgaggtgcgaaatctttcatcttaccagttacatcacccataactacaaattcattggtaactaacttggtacccatatattgagccatttggaaagcatgactagagtcgaaacctaataaccatgcaaatgggaacattacacaacccagaatgttttctagagaaagaactgggttaatcttacctagtaaagcatcaatcaaagcagccaaagcaacaaaggcaattacgttagctgtgataatcaaaatcaaacgaccagcgcccaaaattgagtcgcccaagaatgagaaaaatggttcgcgttcaggcttcttgctaactgtttcttcagcaactccttcagaaccagattcgatggtatctgtactttcgccagaggcacttccgccaatcttagcaattgtatcttcttctggtgttacagtaactggattcaaaactgttgtaacaataattgaattaacaatgttaattggaacagcagcgatgatatattgacccggcatcataagtaagtatgaacctaaaattgatgcagtaacacaactcattgacatcatggcaattgtaaccaaacgttgtgacttcatgttacgaagttgtaaacctgaaacagcaagagcttcagtgttacctaaaaacatcatttctacagcgaagaatgattcaaacttaggttgacgggtaatgaatgatagacccttaccaacccacttgataatccatggaaggataccaatgtaagttaaaatatcaaacaatggaacaatcatcaaaattgggagcaatgcacttgtaacaaagttcattgatttaacgtgtacccaatcaggtaacgcaaattcaatacctttataagaaacatcaaccaaagctttaaagccatcagcagcggctttaaccccgttaataccaacagacgagttaactaagaaccaagctaacagaatgttgatcactaccataataccaaccgacgcccagttgatatgtttacggtcttttgaaaatagaacagcgacgcctagaaatacaataataccaataatatttattgctaaaaacatgccgaaatctccctctatgatccaaattatgtaacagacgttgtaataataataactactaaatattagtctgtaaatacaaaatataaagatttttaaaaggttttcgtaaatcatccactacatcttgtggtgcggtccaaaatatgttaaaacgatttacctacagtttccagaacgctttgactgctttttgtaaatcgcttacagaagttactttttggtagtttttccaatgcctgggaaataaatttaaataacgggatgtgacaaatctttgatccattaacaaaatattacctcgatctcgtcgagttcgaattaatctccccgctgattgaagaacgtggttcattccaggtaattgatatgcgtactcaaatccatgaccatttttttcgtcaaaatattctttcagcaaatttctttccgtactcaagcccggtaatcctacacttacaatccctacaccaattagttgctcgttaattaaatcaattccttctgaaaagagtccgcctaacaccgcaaaaccaactaatgttcccgatttttcggtccgaaaagcatctaaaaatgctgcccgctcttccatactcatctggctagtttgcaggtgaacttcaatttcaggatgcatttcctgaaatgcatccgcaatttgatttaaataggcataggatggtccaaaaattaagtagttccccgtcttggcttccaccagagttgcgatcgaagcgatgatgttaggtaaatttctttggcgcgccgcatatctagtatcaatataactagtaattaaaagattttgctgtttttcttcgaatggtgaagccatctgtaaggtcaagcctttcgtacttcccaaagtttcttgatagtattcaacaggcgataacgtagcagaaaagaaaatcgccccgcgccctttttttaatgaggcatctaaataaggactgggatctagaatctgttcttcgatttttatattatcttcaggattttgaattaaaattcgataactttcatcaaaatattcactgatcttaatgtatttattgttggcaaaaaacaaatccaacatggtactggttaaatcgttatcaggttgtttaggcagccattcccggactacttcattgaagttcaacatggctttttccagcccgtctagtggactatattccaccatataatcttctgtttgatttttaaatgcttgatgaatcaactcaaattcattatctaattgggtcaatctacgtttaacttgtttcgagtccacgtcagtggttgaggattcaaaaagttcttgtgcttgaattaccaaagcttgctctaccaccgctgaatacattgctctagaacgcgacaccaaattatgagcctcatcaattaaaaagaaattactttggtcttcaattgtaaaaaagcgctggagatacaccattggatcaaacaaataattgtaatctccaatgattaagtcacaaaataaagataaatctaatgaaaattcgaaaggatctaacatatacttcttcgcatacgtttgaataacagctttgtcgaacttgtcttcattttctaaggcgtcctctatcccatcctttactcgatcataatacccaatcatgtatggattttcttctggtttcatatccacttcttcaggaaatataattcgatctttagctgtaattgtaatggatttaattctcaatccttgattagccatcaattcgatagcttcttcggcgacgtgctgagtactttgcttagccgtcaaatagaaaatccgttcaataacttcctcacccagggctttaatggtcggaaacatcgttgaaactgtttttcccgttccggtcggagcttctacgaagaggcgttgtttagttaaaatagttttgtaaactgcaactgctaggtctcgttgtccatttcgatactctggaaatggaaattctaatttgcgcgctgcctggttacgttcagtacgccaatcattgcgtagcttaatccacttttcgtattgtctaaccaaatcatcaaaaaattcggtcagttctgttcgggtaaatgtttgtcttttttcaatcacttcgtcggttggacgttgataataagtcagttgaatggtcactttgtcgaagtctaagtcttgcgtcaaaatcgctccgtaaacttttgcttggctccaatacaatgtcttagtattctcacttaactcttcaaaagtaggatccgaagttttaatctcttcgataaacaggtcatcgtcaataactactccatccgcacgaccttcaattgtaaaagcttccccatccatttcaacggctcgtttaacgtagtattctttttcgtaattttcatcacgttgcttttgcaatttacgatggatgcgggcaccctctaatgcagtattttgactattcatcgtcgcgttcaagtcacccgtacgcaaaataaattcaactagttgtcgaattcctatcttagttacgctcattcaactcacctctatttcttaactttttcattatcccataaaaccttttctagaatttctattttaaaaacgtatttatggtatgtaatcaaaatctaggaggatttttatgcataccaaattacttctatccagtatgaccgttttaatgggattaactttcagcattcatagtgtttcagcccatggtttttcaccacaagtagctccactttcagattcaccttcagctgaagttcaccacccatcgtcccagccctcttctgcttcatctaattcttttactgcaattcagacggtattatcacaacatatgggtcagccttacctttggggagctactggacccacagccttcgattgttcgggcttaactcaatacacctttaaaaaagctctaaatcttaatttaaatcgtaccgccgaacaacaatttaaccaatttcgccatgttagccatgatcaagtccatcctggagatttaattttcttttcttataatcatgggcaatccattgatcacgttggcatcattgttgaaggtcaaaacatgatggtagatgctcaaaatcggggcgttattcgtgaatgttatctagttccttggtggcgagggtacatcgctggatatgctcgagtaattgaataaataaaaaaaagaattccagctggaattcttttttattaaccaaaatgacgcttccaccaaccttgtttaggttgatcaagaattttttggttcttttcggctaattcgtcaattttttgttccaatttgacgttttcttcatggtaactttgattctgttctaagactttcgtcaaaagttccttaagatcagccatatccttgctttgcgaagcaataaagcgtttcatggattcatcgataacagctggtgtgttttctgatcctgtaacttcatcggtatcttcgccatctttactactgttgtcattcatccctagcgttgcctgtacagcttgctttagcgtatgacgatcaccaagtagttcgttcatcttagcaagaatttccatatcctcttcagaataaatacgacgtccacggccatcatgttgaaacttatgtccgctacgttccatttccttagcccaattacctaaggtggcaagactaccaattcgttctattttttcaacaacatctgaacctgtaacatattcatctgctataatatcttttgccattttttcacccactttgaacttaattttactacataatttgtaacaattgaagtacgatttcagttaaatagaaacctacctatcaacataattgctacttttcgccccaaaacgggtcaattgaaataaaatcaatcctaaaaattcaaaaccaaagattaaccaagctaaaggagcataactctgggttcccattattccggctaatggagaagctaaagcgccaataatattcattaataaacctaagacggctgaagccgctccagcatttgttcttccacctagactcatagccatggatgttgccaccgtattaacaactcccacgcaaaagaccacaataaacaggggaataattactaagatcgccattggacgtaataataagctcccaactaataatactcccgcaaacatgccaccaattaacccgccatttaagatatcgctatccttgatttgctctggtaggtagcctggaagattgttaccaagaataattcccagtccgttaattgcatataatagactaaattgccctactgtcatgtggaaataagtttgaaatacaaatgaagaagcagaaatatagctaaataatgcaccaaaaatcagcccttgcgttaaagcgactaaaataaattgtcgtttaccaaacattgctcccaaccctttgaaagtttgaccaagcgtcaagacttcattgttcgttaccttcaacgtttcgggtaaggtacataatacccccaccatcactaaaattccgatcacaaataatagtacaaaaatcccttgccattggacaatagaaagtaatgctcctccaataattggcgcaataattggaaaagcaccatttaccgccattaacattgcataaaatttagttaattcatgtcaattaaacaaatcacgcgccaccgctcttgagagcacttgcccggttgagcccgctagcccttgaattaggcgaattccaataaacagatagatattagtagtaaaaattagcatcaatgaggtcaccgcatataatccaaatccgactactaatggaactcgtcgtccaatccgatcactaataggacctacaattaactgtccaaccgctaacccgatcaaacaagatgtgatgctcaattgtaaggtagaagctgatgagtgaaaagctcgttgcatttcaggtagacccggcaaatacatatccattgataaaggtcctgtcgcactaacaactcccataaaaaatacaagccaccatttttttacagttgatatcttttcattcataacctcagatctccttttttaaaacttcaaattcaagtgtaacgaaaattagttcaaaatcacacatcaaattttggtatccttaatatgttagaattgttagttgacacataaaatcgaggtaatcatgaataacaaagaaaaaacaaactatcaaggcaaaaaaaaattcggtaaaaaacctagtgaccgtcaaaaacaagaccgtcggaagaatttttacaataatccccgtaaatcttctgacatcaagattggtgacgaaattccacttaaaattaaacgtttgggtataaatggtgaaggaatcggttactaccagcgtactatctgtttcatcaaaggtgcgcttcctggtgaaaaggtcgtagcatccattaccgatgttcatccccgttttatcaatggtgaagtaagtaaaatcaaaaaaatcagtcccgatcgggtaaaacccattgacgcatatgctggagaagtcggtggattcgaacttgaacatttagcctatcctgctcaacttgaatttaagcgtgatgttattcgacaatcactaactaaattcagacccgaaggctacaaacgtttcgaacttctaccaaccatcggaatggaaaaaccccttgaatatcgtaataaggctcaattccaagtccgtcgtttagatggtaaggtagcggctggactctataaggaaggtactcatgatctagtagatttaccaacttgtagcgttcaacaccctttaacgatggaaatcattcgaattgcggtcgaattattcgaaaaatacaacgtaagtatctatgatgaacaaactcatacgggaagcctaaaaacgatcgtagtacgtgttgctgacgcaactaaagaaactcaagtagtctttattactaatacgccagaattagaatatgtagacgaaattattgatgaattagcagctcaattccctgaaattgtttccttcatgcaaaatcttaaccctagtcgcgaatcattaatctggggtgataagactttaaacctgcgtggtaaggataccattcgagaagaattggatggtctatcattcaacctatccgcacgcgccttcttccaacttaatcctaagcaaacttctgtactttatgctgaaactcgtaaagccctcgagttgtctcctgatgacaatcttgttgatgcttactctggagttggaaccattggactttcacttgctgctcaagctaaggaagtccgtggaatggataacattgaatcagcgattgaagatgctaatgaaaatgcaaaaattaatggcatcgaaaacgctcactatgaatttggtacagctgagaaagttcttccaaaatggctacatgccggttttaaaccgaactcaattgtggtcgatccacctcgcgttggtttagataataaattaatcaccgcaattttggaatcagcacctgaacatttcacatatgtttcatgtaatccctccactttagctcgtgatttagttcgtatcgttgaaaaatacgatgtcgaatacattcaatctatcgatatgttccctcaaacagctcgtgtggaagcagtagttaagttaaaacgtaaataaaaagttgtgacaaaaggctgagtttaagcgtatagctatgagaactcaaactaccttttgtcgcaacttttttaatttatccatttatttttcttagcaacttcaatggcttcaagtcggttatgaacccctaacttactaaaaattgctgataaatgattacggaccgttccctcagataaaaacagtttttgagccattactttagttgcatccccactagctgcagcctttaaaactgacatttcacgcttggataaaggatttttatttgatgataaggctgtaactactaattccgggtcatacactgtgcgtcccatcatcactctattgatagtttcaatcaaatcatcacttggactatcttttaataaatatccagctacttctacttcaactgctttttcaaaataagtcttttgagcaaatgtagttaaaataattactttagtagcaagttgcttgtcatgtaaaacttctgcaacttctagtcccgacatcatgggcatttcaatatctaaaattgccacatccggttggagtcgttggatttctgctaatgcgcgttttccattggttgccgatcctaaaacttctaaattatcttctaaatttaatagctgatttaatgcagtatttaacatgctttggtcttctgcgagatataaagttatcatcgttactcctctggtaagttaaaggaaacttgcgttcctattttattttgttgaatatcaaattcgccatgtttagcacgcatccttgcttgcataccggaaatcccattagaaccctgtcgaataaaagtttgcgcatgtccatcatcttgcacttcaattcgatagcgaccctcagcatgaataaaacgaatctgaactgtacgggcttgggcatgacgaataatgttcgtgattgcttcaataattacagctgcaaattcattttgaacttcagttggccaatttatagcttcattttcaccttcagtcatcataaaaatattagcatccgtcagattcttactctggataaataaagcttcacttaatgattgttgatgtaaatcgttaacgatttgacggacaagctgcaaatttgctcgacttgtagtcgcaatgtcttctagttcacgtcccacttgatccgaacctttttctaacaatttcttagctaattctgttttaaccgtaatcatcgaaaagctttgacctaaagtatcatgtaagtcccgagcaattcgctcccgttcaccccgacgaacaatggtttctaagcgtcggttatcttgacgcatttttcgacggtagcgaatcgaaactgcaaaagcatatgacatgattggtgaaataattggaaacgccagacccataatgtttccaaatattcccccactagtattagtagtaatttgcgtaggaaataatccgataacttctactagcccgataattaaaatagtgtaatacgccccaaaaaaagccataacatattttttaggtctccccacaatcaaaaatgctacttgccaagctgtgaaaaccatcatatagaaattaaaattaaaaatggtaaaaattcccgtgattaagatttctaatggaatggaaactttttgccattctggtttttcggctgcccaaatataatctgctaagaaccctagacacataactatccaaaaagcatccgttgccgatttaattggtaaataaagcgaaatattatatggcatatataataaccagatataatattcccatttcacatttctaaaattccatttatttttaaccacgagccaatccaccctttcgtcgtgtgatgattgttcccactgtcattacggcgaccaatccaactatccaaacccctagaccctgaacgtcattccagttaattttagcattattcactgtgctactaatcatatcgttcaaaaaataggttggtaatttattaccaatattttgaacccaccgcggtaaaatttgaattggccaccaaagcccgcttaaaatagccactggaaatgtaattaagtttcctaaaattgttagagtttcttgtcgtttaacatgtgatatggcaattccaagtagtaacagaggtatttgacctaaccaaactagtcctaatatagttacccattgcatagtacttaaatcaacatgattgatcagaatcgccgtcgttcctaaaataacaatcgtaaagatgttcatcatcaaactccaaaaacaaatcgaaatataataatgatttaaattacgattagtaatctttaaaagcgtaattaatccttggttacggtctcgctccataaaattgccaacgcccataatggcagtaattaaaatactgtaaaccatcatgctccccatatattctgcactaaacgttttaatttggactctattaatttgcgtaaataggatgtaaaaggccgtgggcatcagcaatgaaaagaacacgaagccataatttcgaaaaattaatctttttccatcaaatttcagttgttcaatcatcttctgcattgtttttttctcctcgagtaatagtttgaaaaatattttctagtgaagcatcaatgatgttcaaatgttgaatctcctctaaatatggtactaagtcccttaacgttgcatctccattagtactactaatttttattttatttccattttgctcaatcgcttgaacttgagttagttttctaaaaatagatcctttacgtttagtttcaaaactaatctgggtggttaaatattgtttctgaagttcattcaaagtaccatcaaactcaatttttccatcttttaagattaaaatctgatcagctgtctgttggatttcttctaaataatgactcgtaattaatatcgtttttccttcatttttcattcgatcaacgttaatccaaaaatcttggcgagcgttaacatccattcctacggtaggctcgtcgagaaaaatcaaacttgcattactaactaaagtcattgcaaaggtaactcgtcgcaactgtccgcccgataaatcgttcaaataatgatgcgctaaatcacttaaatttaattcttttaataccgtttggggagctttaggattaggatattgagctgctacctccgccaaaatttctccaactttcacaccaggtaactttaagtcaccttgaaacattgatgcgactgattggctcattcctggacgatgtcctaaaattgatactttcatatttgtttttaataagcctaataagatttttaaaagcgtagtttttccggctccattttcaccaattaaaccaacaactttccccggctggacttcaaagcttacgtcttgtaaaacttgttgattgccgtagttgaattttaagttatttacgatgattgcatttgtcataattattcctccatacttatatcatagaaaatacctcttcgtttccctagtactgcttgtcaccaaaaagtatgacaaatgtcatactttctaagaacttcttaagttcacttaactccaatggattttcatagactttaagccccaacatctgaataataataggaaaatagtgacaaaatattctttggaggacccccaatggaacaatacattattaatttcgtaaacgactttggttatttaggaattattttgctaattacactggagaacgtctttccccccatcccttcagaagtgattttgacttttgccggcttcattaccctttcttccaagcttaccgtctggggtagtgtccttgcagcaacgattggagcagtgattggggcagtgattctatatattattggaagttatctaaccgtcgaacgcttaggacgtctaatcagtagccgccttggtaaaatcctacgtttaaaacatagcgacgttaccaaaactcataatttctttgtcaaacatggttccaaaacgattttctttggccgttttgttcccgtcattcggagcctaatttctttaccagcgggtatgactagaatgccttggaaaatctttgttttattaactacactgggaacgttgatttggaatgttgtactcattctgcttggtcgactggcaggtgaggcttggtccgaagtatcagctacaatcgactcctactcaagcttagttttaatcgttctgatcgtgctgtttgctggatcagctatcgtctactatttcaaacgaattcgagtaaaatcctaacctagtaatcgctttcatgttagaattaacctaacttattcagctaggaggaatcattatgcacaagcatctacctactaagcgtcaaaaacaacgtcttgctccagtggtggctttcgaaattaccggtctttttattgctttaaaagatattattactgccaaaaaattccgtcatgggtcgcgtggtctgtggttagctttagtatttattcaacctatcggaccttggctttacttctggttaggacaagctaaaacggattaatcggtcctaggaagaagatgaatttttttgaaaactgctgacgtcaaaagacgtttcttttggcttgtcatatctattattttaaattcggcggccaacgctttatccattgctacgggtttaggtagcgccgtctggacgggttctgcagtgaatctctcacattgggtagctcataccaccagccctgcaattgctaatcacgtgatgggaacggttttagttttatacggagtttcagtagcttttttgaccatgcttttatcgcgccatttggattgggctcgttttgcccgcaacattttatttgttgtaccgtttagttatctcgtccaatggttcacccctttttggagtgatactttaaaaatcagccagttgcaagctaattttcaacatccttggcagcttttaacttctgttattctggatattattggtttattgggcgtggctgtagctgtttcactctatcaacgggcgaatttgattatgcatcccaacgatgatctttcctacattctacgttttagatatcttcacggtttagcctcagtttcacaatgggctagttatgtcccaccacttatcatcaccgctcttagctgctttgctaacggcggccgattatggtcatttggtttcgggaccgtttgggcctttgttacccaaggttacgttcaaggttggtccgatcaacacgtagttccaacctttagacatcatttttcatttcaaagttcaaaaaagctttgataaaagggcgcattccatcgtgaatgctaacaaccttttaccaaagcttttttatttattcaatgttttaatgatttttttagcaacaattgttgcatactgcttggaaccatcaggattaggatggacataatctccatagaaccaaccaggttgatttttagaaggtgtaaaccagtcaattactgtcaaattcttgtattgcttagtcgctttatctaacgtcttatttaccgatccttcccatgtcttcgttggaacatggacattaacccagaaaatatgacgtttagaacctaccgcatcttcgactgctttaacgtccttatcagaaatcggaccattggcccctaaattaattaggacattatcacttaaagttttttgacgttttaattcggcaataataccaggcgcttcatcaacctgccgtccaacttttgatgacatataagctgttggaaaaatttcctgcaagtctgctcccgtatcttcgagaacggaatcccccactccggttaatggagttacggcagcaaatttcatttcttgatcagtcaactgatactttttagcgatttctttttcttgtttcgttagtttagcctttttttgcttcgttttggctgcactagtttccttttgtttttccaaagcttctttgtttttcttgtcggcctctttactatttttagctaatttagtttgtaatccatctgttttttgaaccactttttctggtgaagtaactgcaccaaatagagcaattaaaaccactaaaacagctggaattgccaagtatcgacgccattgtaagttagatttcaaatcaaaaatctttttcactagtgcaaaagtttgccgatagtcaaatttagctagtggaatttcaatataacgataagaaagttcactaattactaagatgattactagtggtgctaaagtgtttaaaactggatgagccgcaatattagtaactttttgttcgtaaaaaatcattactggtagttgatacatataaatcccataagaccgacttcccaaccatttgaatacaggattagtcaacaggcgattccacataaacgacggatgagcgatgatcgcaatcattaaaacggccagaatagagaatatgaaaattccaccataatatggcgttgcggtggtccccggcatagtaaagaatgtaattcccatgactaggattaatataccacccagtatattagcgattaaattagttctcgcatttagcgcttttttcaagcgagtcgacggccaaataaaagctaacgctgctccaatcaaaaatggtgcaactcgtgtgtctgaaccataataaactcgattaactgtatctggatgatagagaatggtcatcagcatcgatgaaatgatactaagagaaaatagaattccactcgcttgaacacgacgttctccaaaaattttcaataatactatcagtatcaatggccaaataaagtagtactgggccaacaccgataaataccataaatgcgtgaatggtgattctccattgtagcgatcaaaataggactgcccattatttacaagccaccagttatacacaaatactaaattagtccagataatatttctaatatgggatagtaggttttgcgcaaaaagtgtcatataggctgtacttgttaccaaaaccataactagggtcggatatagtcgacgtaatcgccgaatgtaaaaagaacccaatttaatttttccggttcgatcccattcttgtataaaaatatctgtaatcagataacccgaaacggcaaaaaagatgggaacccccaaatatcctccaggaacggtaaaaggcatcagatggtagaaaataactcctagcaatgccatcactcgtagtccatcgaagcctgtgatatagcgtcgttctcctacattctttcgctcaatctcaatagaagtcccatgtaagtcagatcttctcatcttttcgcacctctaacatttaaataaaccaaattttattccccacaatctattcctcggaatacccaaatgctgcgtattcttaaacttgttaaagtaccggctttagacccttacctatgcgttatttataatgttctcactttttttattaaaagttcaaaaagcacttaattattatgacacaactttaacattattgctgttataaataacgaagttactaaatgaatttaaattaacgattacctaattcacttttcgcgcttaaattttgatgataagattaatttaactttgtcttaaggagtgattattttgagaaaaattgcagtatattgtggggcagccgccggcaacaatccaacctacgctaacagcgcccgtaagttaggtaaatggatggctagtaataatattggcttagtttacggaggtgggcaatttggtttgatgggaatcatcgccaaaactgtcattgaaaatggtggtcatgtcgatggtattattcctgaaaatttagcagcacggggcgcaagctatcaagctgtctcaaatctccaagtagtcaaagatatgtcaattcgtaagcaattaatgatggatatggcagatggtttcattgccttacctggaggtcccggcacgttggaggaaatttctgaagtattttcttggtctttaattggtgacaataataagccatgtgtccttttcaatactaatcactactatgataatcttcaaaacatgtatgatcatatggtggtcgaagggttttcttaccagtcaagctcggcaaaagctcctttttagtgattccgttgaacaaattgcagaatttatgaacacctatgttccaccaaaaattcgtgaatattaacccgatgatgcgcatctagcgcatttttttgtacaaaattcctatttcagcatcattacaattaaaccaatggtaataattattcgaattataaaatgattccaattgatattgaaaaaaattagttgtccattaattaatgccactggtaacgccaatatcaatccgataattcccagccacggttgaaccaacgtcaaaatcatcaaggcacctacaataacatttaaggctgtaatccatgtttcaacttgtaccccaatcctgtaggcactaaaaatcaaaaaaccgccgtataacatcgttaatataattccaatcatatgtagcataggggtccactccttattatttctaatagagaacgctttctgaaactattgtaacaatttatctagcatattggcgaaaaactttgtagttgacattctactcccttatctatatagttagttacacaagtaattaagtgattcaggaggaggatttttatgattaatcaaccaatcgttagcgtttcgggtttacgtaaaacttacggggggaaaaacgaaaaacaatacgaggcattaaaaggaattgattttaatgttgaacaaggcgaatttgtcggaatcatgggggcttccggctctggtaaaacaactttgctcaatatgcttgctactttagaccaacctactagtggtaaggtcatgattaatagtcaagatgttactacccttaaaggcgacaaaattgcggatttccgggcaaatgaaattggatttattttccaagattttaatttgctagaaacgctaacagctgaagaaaatattgcgcttcctctatcacttcaaggggttaaaaaaagtgccattaaccaagcggttactgctgtggctgaaacactatccattcaagaccttttaaagaagtatcctacagaactttctggtggacaaaagcaacgagtagcagctgcccgtggaattgtccacaaaccagcactgttattaggagatgaaccaactggagcacttgattctaatagtgctcgtgagttgcttgaacttctaaccgacattaatcaaaaacaaaacgtttctgttttactcgttactcatgatcccttttcagctagtttctgtaatcggattttgttcattaaagatggcgttattggtcaagaaatacgtcgtaacggagtttcacggactgagttttaccaagatattcttgaaaaactcggaacttttgaacaataggaggcgaacaaatgttatctagactcgcactctcaaatatcaaaaatcgattacgagactacatcgtcctcttgaccggccttgtaatgtcttctgccatcttttatatgtttgccaacttggcaaccaacgaaggctttattaaaagtaatactacttttagatttgctgttcctgttttttattttggtgaggtattgctcgtaatcatcactttagtttacgtcatgtacgctaattcattcttattaaatatgagacttcacgattatggtttattcatgatgttaggcgccaaaaaacgtcgtgtaggaacgttgatggttttcgaaactttagtcgttggtgccattgccaccgcaatcggtttactactaggaattggtttgacagggggactttctaagttactattttcacatcttggaattacgctccatcattttaacccattctattttaaagcagtactgacaaccattattttgtatttagtactttttgtcattgccgcaatttttaatctacaatcattaattcgtactccggtactcaaattgcttaaacaaaatgatacagttaacaaaattaaggctcatggaattgggctttactttgcaggaatatttggagtgattttaattggaattggttactatgctctagctcaaattgctaccttcaaattaacttctattccaattgccctagttactatcgtgctagggagttatttaattttccactcaagcatgattcttattattgaacgtcttaagaaatctaattgggcacgtcgtaaattaaacaattttactttatctcaaattatgttccgcgttcaggattacactaagattttaacaattacgtccctcttgttcgccttagcattaggggccattaccgtgggctctgcgttcaaccgtcaaatcgattcaatggctaaaagtaatagttcctatactattgctattaacaatccaacagctaaagagcaaggtttgatcgaacaattatctgatcgtacagtcgttaaatatgaccaaaagtttagtggtaaccacgttatctataatgaagatcaatttgctcaacatccatataagattgttgaaacaactcaaagtaagtctggtactatgaatacgtataaaaacgttccagtttctatcagcaagcttaaaaaagaagttagcagccaatttgattttgtaagtttaggtggttctgttttagacacggctcctaaattctattccacaaacgattttaataaaattaacgccaaaaaaggttctgttagtttaattacggttaaaagtattgctgagaaccgtactgttttagagaagttaaaccatctccaacttaaagcttatccaacaatggatgaaactggcattggtgctggtaccttccctgccttcttaatgattagtgggatctatggtggactagaatttatcggctacttcttaggaattgcattcctagcaatgctagcaagttgcttgatgttcaagattctttctggaactcaacaagaccggattcgttataacttgctaactaaggttggtactcgtcgctctctactaaaccaaagtatcaatcgtgaaatctttgtgctatttgcacttccaggtatcctaggaattattgatgtactctttggactccaaatgtttaagagcttcttcaataataatccttatcaaaacatccaatatccaatcataatttttgttgtactatatctgttgtattacttcctaacaacttggttatataaattaatcgtattgcctaaaaagaaataaataaaaaggtgaacccatagaggttcacctttttttatatcctagtattcaattatttaacttgatgtccttcagccacatactggtccatatcattcttaggcaccatgctaccacccgtcgcccaaacaatatggctagcattttccattggataatcctgttccaattgagcttgaacgtcatctaaaatcgtaaaaccagaagcagctgatggttcaacatccacattttctgagtcatgcaattctgcaacattcttcatcatcttttgatcatcaaaagtttgaattccatataataatgtatccatcatcttaccagcaattctagatggacgcccaacagcaagaccgtcagccttagttactccatcgattccagcatcataaactgaaatttgatcatttaagccggtcatcattcctagcgaaactgatggaatatgagttggctccgcaaaaattggatgaacgttttcgccaataatcttctttagaccaaaggctacaccactaaggctaccacctactccagcaggcagatatacaaataatggatgttctgcatcaactttgatattttgagccttcaattgagcttgaagacgaactgcagcaaccgaatatcccaagaataaatcgtacgacccttcatcatcgatgaagtaagccattggatctgcttcagcagatttacgtgcttctgtaatagcatgggtgaaattgtcgttatattcaacaacattaacgcccttttcacgtaacatatccttcttccattgagcggcatcgctcgacatatgtacgctagttctaaaacctagtttgcaagctacaataccaatcgatagtccaagatttcccgttgagcccacgacaattccatattgtccaaataaatccttgaagcgtggttcatttaatttagcataattatcaccatatacaatttcaccgtgtttcattgctactttttcggcaaatttcaacacttcgtagattccaccacgtgacttaattgagcccgaaattggtagataattatcagccttaagatacaaatcacccttaacttggttttgagcttcggcatttaaaacagccttcatcttatccattttgagcaaaggggattctaaaattccatgtgctggtaaagtttctgggaatgctacctcaaaataaggtgcaaaccgttgaaaacgagcttcagcatcgaagatatgttcaactccaaccggtaattcagcttcctttttataattcaggttcttccaaaaaattggttcgtaagcttgcatctgcttaatcgctggatattttttgcttaaagcatcaacatcaatcataattttttatctcctcgttattgtattcacatttagtatacaacgcctagaatgctttgctaacccctatttcaagaattaatgtattcattcacaaattcttctttagttttaatttctttaccagaattaacaatcatcgcgtgaaaatttttccattcttcatcggttaaattaattgctgcttcaacttcttttttggcctgttcatacttagatggtaatggatgccccatccactcaaaaattcgttggctatatttatcagctataaaacctgcatggtcaaatgcgtacatcattaagtagtccgccgtttctggaccaatccccaccaaagccaataattctttacgtaggcgcaacgttggtaatgctccaattttttcgattgaaaactgatatttttgtgcccaagttaggacattttggatggtttgcgattttcgcgtataaaaaccgctgggacggatttgaatttgtaacgcttcattactaagccgcaaaatccgatgtggatcaaaattaaagttgttctttaaattcattaaacttggtgcgacattgacccaacttgtattttggactaggatgccaccatagactacttcccatggcgattcttgccactcttccaaccacggctgcttacccattttctgatacatcatcttgtaaatcgttggaatttccatgtcagtctcctccctctatgtattataattcttttccaaaaaaacactataaatctaaaattagcgttagaatatacttggaaacaactataagtttttaaggagaatttaaatatatgattgaaaaagcttgtacaactgttctagtcggaaaaaatgcttcaattgacggctcaactatggttgcccgcaatgacgatacatttttaccactagctccacatcgtttttatatgcatcccgctgaaacaggtgtagacgaaaccatcgtttcatctcaaaatggtttcacagccaaattaccagctaacggatatcgccataatgccgttcctaatattgatcccgataaagatggtatttacgacgaaagtggttttaacgaaaaaaacgtagccatgagtgctacggaaagtgtttacggtaacccaaatactttggcttacgatcctttggttcctaatggtttagctgaagatacaatgcctacgatggtcctaccatacatcgattctgctcgagaaggcgttgaatatttaggaaaattaatcgctaaatatggttcacctgaaggtaacggtgtgatttttagtgacaaaaatgatgtttggtacatggaaattgttactggtcatcattgggtagctcaacgaattcctgatgattcttatgcggtagctgccaaccaagttgccattcaacaagtcgatttcgatgatcctgataatttcatgtggtcagatggcatccaagaatttgttgaagaacatcatttaaaccttgatcacgaaggctggaatttccgtcgtattttcggtacagatacagaaaaagaccgtcattacaacactcctcgtgtttggtatggccaacgttatttgaatccagagattgaacaagacccacaatcttcagacttaccatttattcgtcaagctagccgtaaaatcaccgtggaagatgtcggtgccattttaagttcacactataacgaaactaagtacgatccatttggtcatggtgctgacgctgatcgattgaagttccgtccaatttcaatgaaccgtactcaaaattctcacgtacttcaaattcgtaatgatgtccccgaagatcgttcagctatcttctggctaaacttcggggttccagcattcagcccttacgtacctttcttcaataatgcgaccgatacagatcctagctatcgtgctactaaagctactatgaaccttgatgacgcttactggatgtatcgtgccgttggctcagtagttgaaggacactacagtaacttcatccaaaccaacgttgattacgtcaccgcctcaaaagagttccttcgtggacgcgttgctgaaattgatgctcaagctgctaacctacaaggcgatgcgctaactcaattcttaacagaagccaaccatgctactgttaaagcaatgaaagaacgtacgatgaaccatttcaacgatttgttagcttctggtttgttattatcaaaattaacctttaacatggacaaaaatctctaatattaaaaatgatgaacgctaaaccttaaagtttagcgttcatcattttttgttttataagatgtattcaccagctatgcgcaccagcgacgtcatttcttttttagctgttttgagccccacattcccccgaccatctggatgattatcactcagaatggatatcaaatagagatgtccattaacttcgacagccccaatcgaattcataatccaacttccggataaggtccagccgtttttattggctaagaaattaggtgtatcgctaaagcccttgattccccactgttgttttgaattaacttgaaacatctctgaaataatataattgcgacctgtacgactaattttgctcgactttacaaaaagatgtttcaataatttaatgtaatcttcggaactaactgttgaaagccaccacttactactagcttgactatgatccatccccagtctagcaaaagtagcatttaatccgctaactccaccaatttttttaaatatagccgtagcatcagcattactactctgacgaatcattcccgcaactaattttttatcactagctgttaatttagcatcttgatggagtaatccaattaaaattggaactttaacggtacttgctgtatacatttggctaatcttgccttgactccaacgatacgttttttgcttggcgacatcataaatggtaaaatcaaaattttcattttttaaatcagtattcgtttggcttagcttgccaacttttttatccatatatttactaaatcctgaatttggtgcttgtttggttgtaatgtgcgttgtagtctcagagcgcgagtgtaaaagatggtgcacttctacaatcaataatgtgaacgaaaatacaattagcaaaaatcccgtcaaccagattttccctttgcgatttaatcgcctaccgtgaaatgtcactcatctatacccctttaaaattatatatgccagttcgattataaccagcaattgacgtctatacaatgtttattttttgtaacattttcccaaatttaaataatttaattactggtcttaaatttacttgaaaaaacaaaaaaaaaactggaataagcataattaatacgcttactccagtttttaaaaggtgaatttataggccttaggattttactttaacatttgttctgcagttttcttgagctctgcatcgttcatattttcccactttttggcctccgcaatggtcttcatcgtatcatgaccgttgtcatccattacatgattccacattgcgtctcttaatggcgtttgatcgttactccagtcaaatacctctgtcatcttttgatcaagaagttctgtctttaatgttgttgccatattaaaagcctccaaaatgcgtgggtgaacatcatctgataataatgatgtcgttcatttttgttgcaccccacgactacgttataacaccagttttaaattttgttaaataaaaagccacagcttttttatagttgtccccaaattctatcttttaaggacactatatttctgccgtgacttttaaactttagttattttctgtaaagataggttcgtgaattgtttctacgtattgcgctgcttttggtgttacatacatgtcttcaccatctttttgaaatagcttagccgcacttaatttgtccattgcttgtcgaacagttgcttcatccaaaccttgttttacgtaattaatttttagatgttgggctttcccagctgcattagtaaattctaagtctaatagtttcatagttactcctccaaaatttttaagcttgatatatgaatgccaattggtttatttagttttgattacttttctaagataactttttcagttgttgtaatttgagcatcagttacattatcagtagacaccatttcaagtattttagccagttccgttacttgttcggcagtgactgtttgcgccacgtttgaaaaagctcttcgaacccctttttcatgatctgggccttccattgtgatactgattcctgttttcaaccaagttttaaccatgttttcatcctcatttcttatcatttaatataagtgtcgcgacgacttacacttactaataacgaatcaaaattaaaaatgtaaactaaatctattaaattttttatatcttatttggatagactactatgttaagctttgatgacttttaatagctaacatagattttaagttaatctccttttataattagtttattagaacaataagtatcaatgtctaccaaatcaaaggagaaaatatttattatgagtagcgtaattggaactttacttattatcgctattgcagggctacagtacctctgcagtcgtattaaatataaatattcaggtgcagtaattccaattttatttgcgggcagtatgctgtactattatttaattgctcaaaaagctagtttctgggcctttttaattattctcgttgtgggagaaattctcctcctcagtatttgggacaatcaatatcaaaaaaatgaacaaaagaccgaacagacccaccttcgtaaaaaatagcctcctctgtatcacacctatagttcttactttatgtctccaacttcctggatcatcttacatataaaacaacatttattgtaggaaaacgcgattaaatttgaatttaagtggttggcaacctttttattgaaacttaacttaatttggttgataatatagaaggaaatttaacaacatcaccatgtttgtttaaacacggcgctggttatggaggaaaataatggacattaatcttgattttccgttaggatcatcaattataaatttggtattgagtcatcgaaacctcgccaccaaagaaattcgcaaacttggactttatccggggcaagatttaatcctggtagagctattgcgcaaagataaccgctcacaaaatgagctggttaaagcgctctgtgtggatcattcaacgattgctaaatctgtaaaaagattactaaaagctgaaataattaatgctcataaatctactgaagataagcgggtaaccataattagtttgaccgttaaaggtaaggcgttagctattcaggccgctaaggtatggaacgatgtggaaaaaaccgcttttaaagatttttcgccagcagatattaaagagtttatgcaatattcacaacatatagcaaaaaattttacggatagaagtttagaactaaatgataaataattttaattgcatctctttctagctgatacccagagttcatcttaaaaataaaagcaatcattacctccgcatttttaaaatgttggaaacgatatgatttcacgtgaaacctatctaatttctcacatatgggggatcatttggttgacagcgttttcagttcgaggtatattgtaggtgtactagaacataggtttcccagcccataattgctctagtatgggtattgaatgagcctttcaagtaccctattagtgctcatatacccttcttacccaaagagtggatctgcttccccagatctactttttttgttgctttagaatttatatttgtgcgtaatttaatcagactgaattatttaaaaaaatcatcattataccctattaaccattgacagcgtttccaacttgaagtatattatagataatctaatggatgtaggtaactccctaagccgattatcatccattagatattcttaccctggttgcgtagtacttcccgaagcacagctttcccaaactacgtgacgtaatattcttacccaaagaaacacccatctacttccctagatgggtgtttcgctgtctctactgctttattcctcacttctttccgagttcctaaccttaatctaggacgtttaaggttattacttcatttattaaaaaacttcctatacctctaaacaatcaaaaagacgtagaagaggtttgggttatcctctactacgtctttttaataattattatccaaccactttttcgccatttaggtatgtcttatctagcttcatttctcggtctaacacaataaaatcagcatcgcggcctggtaaaatgtgtccacatttgcccccaattcctgcgctatcggccgcatttgcggtggccatctgtatagcttgttcaggagtaactacattccaatcaaccacgttctttatggcgtcttttaatagtaagatactgcctgctaaactatgactgctatctttcaaacgagccgtaccattttgcacaataactggaaattctcctaaaatatagtcaccatctggcattaaaccagctttcatacagtccgtaactaaagctaccttactaggagttttggcatctagtagaatcttcactacatatggattcacatggtgtccatcacaaattaattcatctgttacaccttgtaagcttagggctgcacctgccataccaggttcgcgatgatctaatccactcatcccattaaatgtgtgagtgaacatggttgccccagcctcaacacaagccttggcctgttcaaaggttgcatcactgtgtcctaaagctaccgtaaccccttcagagctaatttgagccgtaaattctactgcaccatcacgctctggtgcaatcgaaattttacgaatcatgccattagctgctgcttgccattcgtgaaattcttcaatactagggttttcgaagtatttcggattttgagcccctttatgtttttcagtataatatggtccttcaaagtggataccttgaactttagccccttcaaagtgatcaaggttcttgctaattacttgaactacttctttcaactgttttgaactagccgttaaagtcgttggcaaccacgaagttaccccacattttagtagcccattagccatggcctcaattccttcagcacttgcatccatcacatcgtgattcaacaagccatgaatatgggtatccactagcccaggagctatccatttatcactatattctacgatatctccatctggttgatttttttgatatctaccaaatttaccatcaacaacttggagataacctcccatttctacattactacctaaaaagaatttttctgcatgaatataatattccaaacttctcgctcctatccttcaaaatcgtgaattgttacaccttttactactcggttaactgtccccgttgctgaaggagtgtccggtgtattcttaaccttgattgatgatagtaaggagatcgtttgagcaaacattacatcagggaaggccatataaccatctgggatagaatcatctccattagcaaaattaaagttgctacctgtaaagttgtgggctgattgaacaccgatgcccataacgactggtgcaatctcgtctcctaccacttcttcaagaatatccacatcatactgacgagtgtaagcattgttgctaacgaaatcaaaaaggagtgtcttactattaacaaatgacttaggaccgtgtcggaagcccatcgaagtatcaaaaacggtcactttttgtccagctgttagttccaaaaccttcaattgtgcttcacgagttagtccacccaatgcaccagatcccagataaacgatccgttcaaaatcggtatcaaccaatttctgaatatcatcaacccggtcaatcacttcatgacccattttactgatggcgttaacataagtttctttctgttcatcagaatgttgagcatcgaaaactaataacgttgtgagtaacatgcagctaaaactaccagtcattgcaaaacctttatcattggaacgtgctggttgcattagaactaagtttttatcatcttcttgggcatggagcgcaagtttaccttctggagcacatgtaatggttatttgatatagatgtttaacgtacttttcagctatatctaccgttgctacactttcggggctgttaccacttcttgcaaacgaaactaaaatcgttggtgtatctttttcaagatattgtttaggggtagaaacaattttagttgtatcgattgcttcaaaacggaaatggtttcgatcaccattttcagttaagtatggcatcgctgtatctccaacataagctgaagaaccagcaccggtaaaaataactcgtaccggttcgttgaattcgctttcaatctttcctaagaaagcatcaattgcttgcttcttttcttggtagattttaaaagtttctaaccatagttctggttcttgttgtatttcacgagttgttataacagcacccatttgggttaattcattatcagtcattttgtacatagtgggaattctcctctcatccatcaatgcttatacttaatgttataaacaaattggtcaccacgagcgctactaatggtatattcaatgatttcatttttatgattgtatgttgttcgacggagcatgaatcctggtgaattaggtgcaatctttaataaatcggcatctttatcactaataatccctactgaaagcatctcatctgctagacgaactttttcaccatagtcttctagaagaacattatagagcgaacgttgtttcgtttctaactcataaattgacagattttcaaatttttcagcaggaaggtaagttcgatcaatcatcattggcattccatccgccaaacggagccgtttgagtttaacaatgggatctccaacattaattcttagcttaccactaaaatattcatcggctttacgctctgacatttctatgatctttgtttccggtttgcgaccaagcgatttcatttgttccgtaaaactatattcatcaccaattttagtcgtatcatccatccaacttgctacaaaagtccccttaccatgctggcggtaaatatacccgatgttttctagttcacttaaggcttcgcgaaccgtattacggctcacttcatactttctcataatttcacgttcggataataatttgtcatttggtttatagttatttttaatttgttttcttaattcatcaacaagctgtccatatacaggttgcttttcattatagttaaatcccatggtttgattaccacactttctaaatctgattcataatttatatgatataccaaatttaggttttgagtggcaattaatgttaagctttaccgattatgccaagtgctgatagcacaactgccacgataatcacgataaagatagcttttgttgaagtcattctctttcgaccaagcatccaatagattgctccaacaattaaagcagggaccaattttggcatgatcatatcaatcttatcttgtaagttaacggtcatcttccctaaatgtgctacgaaaatcacatgagtattaaccatagtagctgctaaagcccccacgacataaactccaagtaacgttgctgcatccgttaaagcatttagctgtccttgcatttcattaactaaacttaccccttgcttgtaggcaaacttcagttgaatccaacggaaccacataataacgaagttaactaacatccataaaatagcacctacaacgttaccttgaaccgccatattagcagcaattgctcccatgatagcaggcaccaaagcggcaaaaattgaatcaccaattgcggcaaaaggtcccattaaacctgccttaattcccgcaacggtttcaagtgaattaacaccttctttttcttcaatcgccatatcaattcctgaaataatagtattaaagaagttacttgtattaaagaattgattttgcattttcatcatttttttcagctcgggagtatggtcaccatacattttacggagctgaggaagaatcaagtaaagataaccggatccttgcatacgttcgtaattccatccaacttggttgaataagaggctacgaatattcatttgcttaaagtctttatcagttaatttataattagtcttattagagttcgtcgccatgaatctcaccatcctgttcatctaaatctgttgcaccagcattttgtttaggttgtgcagctactaaattgctttctttaacggaacgattgtactgcattgcagctagcgcaaaaccaatcaaagcaattcctaacattggaaggtttgcgaaaacggtcgtgaactttgcattcattccggcaatagttgtgccaagtagggttacattgccataaattgttgaaagcattgctgtgataacaaaacctaaaattaagtatggccaatgctttttaactggtagataacgaagcaagatagcaaaaccaacggcaggaagaagtgcgcccgcagttgcaagaccgttacttaaccaagctaagttggtattcatataatctacggctgtacgtacaaatggaccaccaaacgcaagtgctagaaatacaggaataccacgtgataatgtccatggaagatatccataaaggtaatttctttcaataccactgtaattttcttcgtcaattaatttatcaattctgtgttggaagaaagtattagcgaaacgtgcaacaatatcagtctgaatcatcaaactagcaaccggaacccctaaagctgcaaccgcaacttcgggtttcatacccgtcccaattgcaaaagccgtagccataactgttcctgagtttgcatcaattttagaagctcctccaaaagttcctaccccaagcacggttaattgcaaactaccaccaatgatcaaacccgttttaagatcacccattactaaaccggcaataatcccggcccagattggttgacttaaactagtttggagcgttaactcatccataatctggtacattgaataaattgttaaaataattacttgccatattgcaatacctgaacccataagaacgcctccttcttattttttagtatcaaattttttcaaaattgccataaagtcattggcttgatcaccaggaaccatttgctgagtgattttaattcctttttcatgtagtgccttaaatgcatctacatcgtcttgcactacattaatagaattagtgatttgagtcgtctcatccgtctgtgacatatttccgacattaatcgtttctaacttcactccgtcgttaaccaagtccaataatacttgtggtcgtttaaccacaataaatactttttgcgaatcatagccgccacgcttaatatgatcagcagctaccttttcagagagcacactcaaatcaataccagctggtcgagctaatttcaaacccgatttttcaatatcgcttgcagccactttgtcatcaatcaccataattcttgttacaccgagcttcgttgtccacaaattggctacttgtccatggattagccgtccatcaattcgtaccgctgaaattgtcatactactcactcctttgttttctcaaaactatgctaataaaattactgtttctaagccttttagttgatatgggatggttaatacatcatgctcaatccattccggtttaaccgctaactcttgaagttttgctccttcatggaagtaaagtttccaatcttgttgttgcttagttttagataaatgaatttgaatttgtttttgatcatcaatcgtgaaatttgaaagtacaatttgatttgaagacgccgtaatcttagttccagccatatcaactacgtaatctatatccgtagttttatttaaaataagttttaaaagcttagctttaattgaataatattgcgattcccaaccatatttagggtcggtattcattggtaaaattatcgtccgcccattgataatggtcatcactggtcctaatttttcagccttcgcactatatgcacttgataaaatttcaactttatttgcatcctcataagcgattttgtaataatcccccgtatgttgaagcatggtgacccgcggattctcaatttgatcaatgaccattccatcaatttgttcgtaagattgataattggttcgagcccgcttaatttccaatttttctgcatcaattaatgttctcaacgttggtctttcaaacaaaatttgaacactttcaccatctaaaaacatgacattctttttaagcaatgctgtgatttgttcatcatttagattgttaaaaaattggccactaaccgctaacacttcgttttcaaaattgcttgtattcgtccatttttccggtttacatgccactcctaaactacccaaaagtgataaccaactgtactctttaggtaagagttcctctgagttttcgcctctagtagtctggaggttaaacgaggcatcctgagatactaaaacttttactccatcgagttgttccacattcaatcgatgttgagttcccaaattcattaagtctttggattctgccaataattcagcatagtcatacgtttcatcgattccattccccatcatatcgaataaattcagcaaaattcccgtagcgcccagcatttgtgtactttccaattgcaatttagtaaacattcttgatttaacaaatggcgaatacatataactttccagctcaggatatacgtctgaatttttgccaaccaattccgtagtcactctggagtaacgttcaaaatctcgtgaatattgtaaaggagaaacttcgttatatgctggtaaatgtggtcgactaactcgtaaatgcgtaccagataaactatcaaatagaccgtcccaatcgcgtccttcaactgcatgccattcgggaaaagaactcatcaaacccaaccttgtggtgggagaaattctagcgaccgtcttttggattaaacgggcaacttttttcatttctactcgcgcaacactgagatatattttgcgttcaagcgtgggtttccctagttgtaagagctttttgacaaattcagtacgggttaccttacgtcctaatttttccgaataaatcttcatatgccgctcacaaaaacatgcaagtttgattggtgtgtgattgtaatgtctaaaatcatcttccagccataattccttaggttggagtttggcatattcaccgtagatatcagcaatatattcaacccacctaggatctgcaggacaagcgatggattcagcgtgttgacctcgataatcaaccatcgttccaaaacccagttctggactaactttttgtccacgatcgctatgcatcagcgttgtccatggatttaaacttgttgttatgtccatctctgctagccgtttagaaacctttgctaccgtaggcaaccaatgcgttctaacttgatcgatggtaagatgcccttggtttaactcttctgggttaataaaaaagactacattgtcaattcgagcttcctgacaaaatttaattaacttcttcgctcgttcttcattccagttaaaaggatcaattgcgaatcttaatgaatattgataggtttctgccatattttttacccgtttagttttgcatttacgtcaataattccattttgtgcttcgtcaattacagattgtttacttacttccattcccatcattacttgattggcaaaaccaatcaccatgggaagactcaaaccactaactacttcaagttctggatgttcagccatcaaacgaaccacaacattggagggggttccacctagtaaatcaaccgccaccattgtcttttcgttattggggttgtcattgataaactgctctgcttcggcctgtaaatcttctggaccttgattgggttgaagcccaatagccttcatgttatcaatatgcccaagaatcatctccgcactagctaaagtttcaaccgccatatttccgtgactcattaacaataatctcatgtaacattcctccatccctgggtttgtaattatgttgtatacgcttacaaacacctgtaaataaacagctgatattactaccagctcaattcatatcataactggttggtaccagtttgtcaaccaagttataggcgctaaaaatgcctttttcatgggatttttatactaaatttttcgcgtttatattttggtatagatggtataaatttacaattttcaccagtatcatcactatttattaaaaattcttcatagacattttcaaatcggtttgttcaataaattagtaataaaaaaactttgattttttacaaatcaaagtttcgattatattaaattaccttcatctaaattaattaaaaaaggagcaatcggatcattttgttcgttgtataacgttaagattggcgcattactatatccatatcgagcttgcgtagccccgttaggaaactcaacaacgacttgatcatccttaatctttgctggaatcgattgccaaacaccattaactaatccttcaatatggcaattttgggtagcatgtatgtgttggacgcctttaaatttaaggtggacttgattcctatctttaataattcgattaaaaaccggcgtacttgaatacgttgtccctgccagaattttccctagccgtgtgccagcaattcttttcgtaaccggatgaggattatataattcccctgtatccgttatagaaactaggtgaactgccgctaaagtttgactcactttcagcatttgttgcctaatttctgcccaagcattccgaagtacgttagcatactttggtaactgaataatatagaatggcaacgaatagtcttggaaaactctgcgccaatcattgataatctccctcaataacacatcatacaaatgacgcgtttcaatatctgtctcaccttgataccaaaccacttgatcgaatgaataatttttaatctttaataccattgctttaaataaggtacctggttttaaataactatctggcgttaccggtggtggccaaggcgtttgtccaacaatattaagagccattcccaatgggacactaggattatctttcataaatttatacattcgtcgattatgacgctgaactttttgacgatataattttacctcttcttcaaactctcggttgggcttattttgcagttgtttctcaaatggacgaacgatttcatccatcaactgtggttggctagtaagcgtcaatttcgacaaccaagttgcagctaatgccccgtccctagtacaacaaacaaccccgatcggtagctgaggatcttcttcggtcatccgcttaactgcataaaaagccattgccgaaatgtgtccgagattagtagtctttaactgatgccagtgggtagtttttgattgatagacttccacttgtccattttggaaatgaaatgcaggctgcggaacgttataataggagatattgttcaatgtgaaatgatttacctcagtctcaaaatcctggtcttgtgccatccgaaagcctacattggattgtccagccattaaaatcactcgaccaaaacgcaccttttttagtaagatttgttcccgatcatctgcaatttgaacttcaaatgaacttctagtatcaatcactggatcaaagcgacatgtccaccgaccatcgcgttttacaattgcacgctttatatctgaagcaatttttacttttacggttgaacccgctcttcccgcaccgctaatctgaaatgattttcccgccggcaaaaccatattatccgaaaaaatttgatcaacatgtaattcgaaactttccatgcttaacctctctgaataaaaaggccagaccctcccaactaacagatcggatctgacattttatgttacctatctttttagtcttacttaaattcaatcccgtattcaaacgtatgactttcaccagcctcaagaaggttattgcctttcttattattccagtccgttggctggtcgctagcttgatctggaagccctgcaaatggttcaatgcaaatgaagggttgagtttcatgttccatcgcccatagcgttagatatgggaattgtttgatgttcaatttaacttcatgagcagtttggttggaatgaagggtcacattttcaagcttcttagcattcaaaataataagtccatcatcaaacatttcatgatttaaagctaattcactagcttggattgatgtatatggagcttcagttccatcgcggaaagaaatgggccccactccgagtcttttaatttgtttttgttttggtccaaatgttaggcgataatcttcaaaaacaccatcatcatcaattggaagattaaaagctgggtgagatcctaaagcatatggcatcatccgatggtcattattaatcacccgatatccaatcaaaagctgattctgatctaatttgtattcaacttgaaggataaaatcaaatgggaacatttcctttgttttagcatttgactttaactctaacatgactcgattttctgcttgattaactttctgccaatcaaaatctcgtgcaaatccatgttggggcattcggtacgtcttaccatctactatatattcatcgttatttgacttaccaatcgctggaaatagaataggtgcatgtttcttccaagcatcaccattccaaatatagtcatagccactttcgtttccaataacatgagtcaattgagctcccatattatcaatttcaacttcgagacgatcgttttttaactttatcatatgaatttagttccccttccttatttttgtacagtcttagcatgattcatttccattaaaatgtaaaggctttctttggctttattcgacaattttaaccttcatctgaacttcaacaccttttgtaattagttcgaaactgttatgatagaattctgttagaaattttgttccacctatgacacttctcccattctttgggttcctttggtcatagtaaaattagtgacgtttacgttataaaggagaatttaatatgtctagttctaaaataaacacccgtgagattgttttatctgccatgattgccgctctttatgtggcaattacatttgtcttttctgctattagctttggaccaattcagtttcgcttagctgaaatgttaaactgcttagtgatttatgacaaacgctatatctggggcatttcgttgggagtcttaatttccaatatgcaatcatctttaggaattatcgatattacatggggaaccctcacaactatcgttacgctttcaattgtttacttagtcattcgtaaatttagcgatacgaaggtaaagatgggcatctgtgttgccatcactactgttctaatgggctttttagttgctattgagctcgcctatgttttgaaagttccatttttctatacttggggaacggttagtcttggagaactaggcgtgatgctaatcggcgccgtcgtaatttatctacttggagaaaatgttaatctatccctatctgctcgcagatagtaaaatctactaccaaaccaaataactacaagcctttaaaataggttcaaattaaatactttagtataatttacgtataaagtgagccttttagtcgaaacggagggactcagcatgcatcaattatctaaagtatttttgattaccttagcatctttttcactggttggattagctggttgtgcagacaaaaaatcagccacagcaccagctactgaaaaagcttcttcacctgcccgcgtccatgaagttcaacgtacaaacgtcactactatcgctctggctacttaccatttgatgaaatccaatggccaacttgaaaagcttaacgatgacatcgaacccagcgcaagaaatgttgtagaagatactgataataaaaaaattgctttcgatgcgggaactgagcaaaatgattattttgaacaaaaagcccatattactatcgataacaacaaggtgctttatacaaccaaacaagataataccagtgtcgatagcctctataaaaagtattccaaaacagttagtttccagcgttttttagatgaatttgaaattcaagaccatgacgaagattttgacgactaaaaaagctgaatcaagaaaagttcttgattcagctttttatagtacctgatttattcaaacaaatttttagagttaatcttctaaattctcaactaccactttacccatcatatggtttccctcaaccagcttatgcgcctgttttaggttctccacgttaattggggataattgcttagtcagggttgaaatcagttctccagcgtctaataaacgagcaatttcgtccaaatatacatgctgagtctccatgtctggtgttccatagtaggacttcgtgtacatccattcccaagcaaatgtaacccgtttacgttttagtgctttcaaatctaccggttcatggttttgagtgattgaagctatcctgccattcggtttaatcagctcgaccatttcatcccaatgcgcatcaatattgtttaactctaaaatataatctacgtattgatgacctaagttacgaacttcatcaatcaagttattacgatgattaacggtttcgtcggcgccatgttttagacaccattcaatagtttctggacgagaagccgaggcgatcacatgtaaaccggctttttgggctaattgggttgcaatggaacctacgccaccagccccattaataattagaatcgacttatcggcgtttccttgcacatcctctcgatcaatttctaattgttcaaataatgcttcccacgccgttaatgaagtcaatggcatcgcagctgcttcagcattgctaagcttttcgggggcatgtcccaccacccgttcatctactagctgatattcactatcgcttccggcccgtttgaatgaaccagcataaaacacacggtcgccaatttcaaaatatccagctgatgcgcctttagctaccacagttccaactgcatcccaaccaatcactttaggttcgtctaaagtttcagtcccatttttacgcaccgccacatcgattggatttactgatactgcatcgactttaaccagtagatcacgtccttcaggctgaggaaccgccgtttcaaaacgaaacaaacttgcttcttcattgatgggtaaatgtttttgaaatccaattgaccacattattttattcattttggtaccattcccttctttaaaataacgctatttcttctataattgtacctcgaaaattgttaaaacttgttactaagtaattgaaaatagccatgttaactaaattttggtgcctaatcttgttgttgtcgttgcaaaataccttcagtaatatcagcaatcgttatttcatccattttttgaaaggcactttgctgtatttcagcgtatgcatcatctaacacgtcttgaatactgccaccaacaacacactgtggatttgtcttagggtcgatatgcaagaggttatgatccatatccaccgccttataaacatctaaaatactaatctcactcgcacgagcatttaacgctgggctagcactccctacttttgtcgtaattagtcccgcaattcgtaaatccgacatcaaatttcttacagtactagcattggattcgatactatccgcaatggttttacttgataaatcgccgtccttataaataattaagtacgtcaaaatatggattgcatcgcttaacttataggaatacttcatcgttaccacctaatttaaaatttcgttaatagcctctggtaaactagttaattcccgacccaaaacttttgctaaactatctgattgatgactgagagagccatcttcaattggtgcctgaaaagaagtaaatagtgccgcagtatctgcatctaagcctcccgcttgaagttgagcttgataggcatccctcgaaatctgcttaacttcaaaatcatttccagttgctgtttgaagggctgcgcccaaatcagcatacgaacgaattttaccagcaaattcatagatagcatctggattttctagcgtaattacctttgcagcagcctcagcatactcacgttctaaagcccatccagcttgctgatttgtccagtaggttgctgtttgattattagcaccactttgtaaaaagcccatttcattttgaaggtaccagttgttacgtagaaatgagtgtttgattccttgttcttcaattagtttctcagttaatcgatggtcgtttgctaaagcactggttgatgcttgagcatttggaaaactagtataagctacaaaatcaacacccgcatttttaattgctgttacaacattttggtgttgagttcctcgagctactttaccacctggttgcgaagaaataaagagcactcgatcaatccctttcagagctttttccattgtagttacatcatcgtaatcaccttgacgaatttctacacctttaggaagtagcttttgacctttttctagatttctaacaatggcgattacgttgtcggttcctactaaatcaattaatttttttatcgcgatttgtccaaagtttcctgttgcagcagtaattgcatatttcatattcataattctccttaagttgtttttttattattaacagcttaatcataccacctgttattttaaagtcaacaggtttgaacaaaaaaactcacttaccttgaagttaaaattcaaaaataagtgagttaatttttattacaaatcatttttttcttagtgaaaaccaccaaatcaaatggataatcaaaatgatgataaatataaaagccaaaagaccgattccttagctggcatgtcgggaatcggtccgtttatttatcttatgactgtaatatatttcaaattctttttaaacgtgaattggtagtcctgcagctaattctgctgcatccataatttcttcacccaatgttggatgtggatgaatggttaattcaatatctttaattgttaatccattttcaatcgctaaagttagctcagaaatcaaattagaagcttccggacccacaatttgggctccaataataccgccagtaggattgtccgtaattagacggataaagccttctgtttggtccatagtcatggcacgtccactagcagcaaatgggaacttacttgatttagcatccaacttcttttcagcaatagattgtggagtttcacctacagttgctaattcaatgtttgtgtaagcaacggctggcaaaacataatgtgtatcatgagcatcttcgccacccatagcagctgctgccaccttagcctcaaaactagccttatgcgctaaagctggtccagcgaccacatcaccgatagcataaatatgtttaactgatgtttgcatggaatcattaacttcaattaaaccacgcttacttaacttgatattggtattattcaaaccaagttgatctgtgttaggacggcggcctactgaaactaaacagtagtctccggtaaccgtcttggttgttccatcagcttcataggttactgtaacatctttgtcagtttggtttgcctcaaccgctgtagcttcagtaacaatttcgactccatttttcttaaagttattcaaaactggctgaatcaattcgccatcaaacccatttaaaatgtgatccaaaccttcaatgatggtaatctttgaaccaaggttcatataagctccagccagttccgctccaatcaccccaccaccaataatgatgagatgttctggaacatcttttaagttcaaggctccagtggaatcaattactcgaccactaaacttaaagtgtgggatttcaactggacgagaaccagtggcaatcaaagctctcttaaagcgatatacatgggaatcatctccgttgattacgttaaccgtttcgttatcattgaagtaagcttctcctcgcacaatttcaactttgtgtttcttaagcaagagttccactccaccagttagtttgttaacaacctgattttgtttccattcttgagttttagtgaaatcaattttagattctgataccgaaactccaaatggattaccatgttgtaaagttgagtagagatgtccagcttgaatcaaagctttagatggaatacatccaacattcaaacaaactcctccgatataatcacgttcaacaatcacaactttttgtcctaattcagctgctcgaatagcagcaacgtatccaccaggaccagatccaataattaaagtatcaacgttaattgcttgtgtaccaactaccatgactacacctccattagcatgtaggcagggttactcaaaagtgccttcagctcattcataattttttgtgctagagcaccgtcaattaaacgatgatcaaagctaagtgatagttttaatgtatttccaactgctaactcaccatcttcgttaaccactggagtcttacgaattcgtccaattccaagaattgcactttcacctggattaacaattggtgtgaagaatccacttccactttctgaaccaatattggtgatagtaactgtgccacccttaagttcattaggcttcaaatcaccggcacgaccacggatggccatgtcatcaatttcttgcgcaacttccataattgattttgatttaacattcttaacgtttggtacgaaaagtccattatcagtatcaactgcgaaactgacatttgtatcttcgtaataaacgatttcttgtttttcaatatcaaccattgcactaagttcagggtacttatgtgctgccccagcaagggctttcgcaataaatggcatatatgttaacttgtagcctttttgtttagcttgttccttaaattggctacgtagatccattaacttagaaacttctacttcatccatgattgttacatgtggaatcgtttgaacttggttagttaaagtcttagcaattactttacgaactggtgacaatggtatccgtccagctttaacttcagctggcgcagccggagtagctggggcacttggcgccttttctgattctgtttctggaactgaagcggctggggctgggcttgctgtaggtgctaatgcaggacttgctttaaagttctccacatcagccatggtgatatgtccatgccgtccagttgctggcacctgagttaaatcaatatcattttttctagcatattctcgtacagatggcattgctaacaattgtccatttgaagtatattctgcacctaccttggttacttcaggtgcagtttggttagctggtgcgcttgattctggttctgtagatgctggtgtttctttaggtgcttcactttcagcaccagcgccacttccgtcaccgtcgaattcaatcaatggttcgccaaccttaaccaccgttcccgcttctacgaaaagttttgtaatttttccaccataaggagaaaggatttcttgtaatagcttatcattttgaacttcagctactgcatcttcttctttaatcgtatcgccgacttttactaaccagtttgcaatttcgccttcagccattccttcgccaatatctggcatcttaaaaatttcagtcaaagttcacgacctccttaactttttcgatgatatcgtctgcttttggtaaccattcattttcagcaagggcaaatggatatactgaatctggagcagctacccgtccgattggtgctttcaaactcataatgaagcgttcactaatttcactcattaccatcgcaccaataccagcttgccgttgtgcttcttgagctacaacaactcgaccagtcttttcaacgctttctccaattgtgtcgagatcgagtggactaaccgttctcaaatctacaatttcagcgtcaatgccgtctttagcaagttcttctgcggccgctaagcttgtatgtaccattccaccataggtgataattgatacgtccttaccttcacgaatcacattggccttatccaatggtgtggtgtagtaaccttctggaacatcgccacgaattgaacgatataaacgaagattttcaaggaagattaccggatcattactttcaacagctgatagtaacaatcctttagcatctgctggagtagctggcataactactcgtagaccaggtgtttgagctactaaaccttccaaggagtccgcatgcatttcaggagtcttagttccaccgccataaggagagcgaaccacaattggaaatgtacgtattccatggaaacggaaacgtccacgtgccatctgtcctgcaagtgaatccataacttcatatacaaagccgaagaattggatttccataattggacggtagttttgggttgtcatcccaattgccattccaccaattccactttcagctagtggggtgttgaaaacccgattttcaccatatttcgcctgaagaccatccgtagctctaaatacaccaccatttttaccaacgtcttcaccaaagataactacattttcatcgttagcaagagctaaatcttgagcttcagtaatcgcttgaatatatgttttttgtgccatgattacttgccctcccctctaaatttgttaatttgttcttgtgcagcttgtcctggaacttctagagtttgttcaataaagtctgaaatcttttgtttatcgattccatctgcttgttttacgccgtcatcaatttgttcattaaccacttcggtccagtcattttcaatttcttcagaccagagacccaatccttcaagatattttctgaaacggataagtggttctttcttagtccattcatcaatttcttcttgagtacgataacgaagtggatcatcaccagacatcgagtgtgcacccaaacgattagtaattgtttcaataaatacaggtccattaccatcaactgcccattgacgtgccttcttggatgctaggtacattgcaattggatccattccatccacaaccaaacttggaagaccagctgcccaacctttagctgctagatgaggagccttagtttgtaatttacgtggtgttgagatagcgtattcattattttgtgagaaaaatacggcgggtgcgttatatgcgccagcaaagttcattccttcgtaaaaatcaccttgcgaagtaccaccatcaccagtgtaggcataagccacattaggttgtttacgcatcttcaaacctagggctgcaccagcagcttcaacatattgagcaccgataataatttgtggcatccagccattaacatcatcaaattcatttccttcataatggccacgtgaccacaagaaagccttataaattggccaacctttcattactaattgcggaatatcacgataacctgggaaaagccaatctcctttttcaaacgcataatttgaagcaatttgagaggcttcttccccaatggttggagcatagaaacctaagcgtccttgttttgctagtttagtggaacgttcatgtagcacacgactaaataccatctgtttcataagttcaacgagctgatcttcattcaaaccagcctctttaagggcatccccgtctacaatctcaccatcattatttagaacttgtagcattggaaaactgtctgtttgtttttccatttgaagattgaaatctaacacttgtttattgtcatcttttacagccataactaaacctcctaagcttcaaataatttaattaattcatcatccgtaatgtttccgaagtaccggccttcatggttacgttcaaagacggtcttaatctctgcagtttcaaatggtaacccaataaattggtctttgatttcgcgccaatcgcgtaaaccaaggaaatcgcccgtgaaattgatatcacgtatggttccaccctcagcttggacttgaacatcgataattccaccgtcatatttagcatggttcttaaagttaaattctggtgaacgaccataattccagtcccaagttgaaaacttatcagccgttagttggataatctcctgtttttgttgcggagttaacacaatctcttggtctttcccgtgatcggttaattcgtactgaaccgcatcccagaaatcttgaagggttaacccttttggagctgcatctttgatcattcccactcgacttcggaccgatttagcagcttttgaaatgaatttttcatccgctacatttaaggaacgaaccatggtatctacattactatcaaatagcaatgttccatgatgcattaagtatcctttggcatagcgctgggctacaccagagatttttttaccatttactaacagatcatttcgaccggaagcctcggcatcaatccctaaagtatgtaaagctcttaatacgggctcagaaaactttttaaaatcaacatttgctgctgattcaattggtacaaataaggtgaagttcagattacctaaatcatggtaaactgcgccaccgcccgtcactcgccggacaacctcaatttggtgttcatcaacaaaatcttggttaacttccccaaaagtattctgattctgaccaacaataatagcattattattctgccaaagtgcaaaaactggttccttggcatttaaattatttagtagccatgtgtccgttgcaatattaatgtacgcatctgttcccatgtatgtgacgtatcgcacaatctaaacccccttatcacgctaatggaagcgctttctaagtacatctttatgatagcacatttgaaccgttttagggctattttttgggtttaaaatgttttaaattgaattttggttttgtgcaattttgttcaaaccttaacattaaatttacatatttgagcaaagttgttaatttttataagataaaaagactagcttcgaaagactaaaaaacctcaaactaattctgataattagtttgaggttttgatttttttgttgattttttgaccaattatagattttcttcagcttgaatttcagaaacacgttcactaatcttcaagaatggtaagtataagaatactccgaccacaataattaagatttgtaaaataactgcgcgccagtctccggctgttgaaagatatggtccgattaaaggaggagttgtccatggtactaatactactgttcgactgacccagccccaaagtgtagcaaagtaacccatcaaactcccaacaactgggaataaaacaaatggaataatcaaaggtaaattaaagacaattggaaaaccaaaaatcatcggttcattaatattaaagattcctggtgccaacgataatccagcaatttgacgagaagatttagctttactaaaaattaaaatagcaataatcaacgcaatcgtactacctgaaccaccgattaaggtgtaattacttacaaatgaagttgtaattatatttggaatggcttggtgatgtgcataagcagtcatgttttcgttcatattaactaatacaaggggatcaagcaatgcacctgataatacggtttgatgaatacttaaaccaaaaaggaaattagctaaagtataaattacacagtaacccacaatacttgtattaaagcctcgtaaaggttcttggatccaagttttaattaagttgattaaatcggtgttgaaaaatcctgccagcaacgctgcaataatagcaaaaaacgacattaataaaatggctggaattaaaacactaaatgaagcagaaactgctggtggtacattttcccctaagtgaatttgtaattttttaatcgaggcaagtttgataaagaggccggttgcaatcagcccaacaaaaatcccaccaaacattccttgcgttcccgtattcaaataactaagtccacctgtgaccgtcgccatttttgcccctgctgaagcaaccgttcctaactgaatgcttcctggcattaggatgaaaatacttgctaaagacatcgcagcagccgcaattggattattaaagcctttattacgagcaagactataaccgatcattggcgcaactaaaattccggctacatttaacgtcccattaacaatggcgtttccaatcacttggaattttgtcagcatatccccactcaaaaaccaggtaaagacaacgttatttaacagtaccccaattccggctacaataaacattggtaaaatgacggcaaaagcatcacggagtgaacggagatatacccagtttccgactttaactgagatttcagtgaacttagcaatgaatttagaattttgcatcttatcattgactgattctttgttcgaactacccattttaaatcctcccattaaagatcattttctaaatcgttcccattagtttcaataacttttttaaaccatctataactcttcttagggacccgtttcatatcacgtaactcgtggttgccacgatttacgtacaccatcccatagcgtttttccatatttccagaagaactaggaatgtcgattaatccccaaccaagataacctaagactgggacaccgtcttccacaaccgcatcaatcatcgcttggatatggtcacgatgatattcaattcggtaatcatcttgaatctctgtcccatcgaatatttcacgataaccgataccattttcaattggaaacatgggaataccgtattcgttgtaagtcttagtgataacatcacggaatcctaatggatcaatgttccatccccaatctgtagcctttaaatatggattttcgacccctccataatctagataacgattaggcatcgttccctgtggaattttggttgaatcaacaacgttacttgcataataactaaacgaaataaaatcactcttcaatttttcaaatgctatttgatcttgttctgtaaaatcgatatcaaaatgatgattcttgatatattgggtaacttcagtcgagtagtggccatgtacccaaacctccaataaattacgattcaaaaattcatcaatttggcgggccacataaacatcacgcggacgacaatttttaggataagattctacatatgctaacatccctccaatttgagcatcaccagtttcatgcacataattagcaacttgggcatgagcggtcattacatgatgggcaattaactggagttcttcgtcggtttggtcacctttcaaatagcctgcaatgtggaaagcttctgtctgtgaatataagttttgttcattaaaggttacccatagtttcacacgatcactaaagcagtccaccattttcttaccaaaacgtacaaatgcgtcaaccacgtggcgactcatgaagccgttgtatttttccgctaaatgtaatggcatatcaaaatgatacaggcaaatcatcggcttgattccacgtttcagtaaatcattaattaatctgtcgtaatattggataccttcttcattaaagtccccatctccggtagggtttacacgactccacgaaatttgaaaacgataacaattcattccttgattagccatcaaatctaggtcttcctcataatgatggtaattatcaatagcaacatcccagtttgaggtagtttcggttgcttcatatgtatcataaactgttggtcccttaccgccttcatgaacacctccttctgtctgcatgcttgatgttgagtttccccataaaaaattatctggtagttttcctttcaaaataacgctcctctctaattgaattcgctttcattatagctttattttttatttaagtaaatacttttattttaaaagactatacttttataaaaattgtgattgtatttaagatacgctaaaatgagggtaacgtcttagaacggagttttaaacaatatgtataaatacgaaaaaatctcgcaagcgattcgcaaacaaattattgaacaaaaaattaaacctggagctttactgccggatcaaaatcaattagctaaagaatttaatactactcgtataacgattggcaaagcactccaatccctaattattgaagggcttatctatagcaaacgtggtgctgggacgtttgttagaaaagatgctcatttgaatgacgaatttactaacgatgttgataaacctttggggactacctcgactcatccgcatagtaaagtcaccagtaaatatattcatttgactgctcggattgctaacgaagtcgaaaagaaaaatcttctactagaagatggtgagacggtctacgtcatcaaacggacgcgttttatcgagggaaaagcttatagttatgaacaaacaattatgccaactaaaattgcaacaataaccgaagaagttttaaaaaaatctatttaccaatatctagaacatgagtaccatttagaattagctggttcccatcgacaaatcactgcccgtaaagtttctgaagaggacgctaaatttctgggtgaaaagttgggcgatccaatcctagtgattagccaaactagttacttagtagatggaacaccttttgaattttctgaatctcgttttccataccaatctagcgcagtgtctgcggatgtcaatttacttgaataaaaaagcgttcagaaaaattttctgaacgctttttttattttttaatttttaaaatagattctgtacccattcgtttagaagttatgcggtttacttgtgcctgttcatcttcaaatcctaagccaatcccaacgataatttccttatcacttggaatatttaactcctctcttaaaatctgcggatacttcacaaagttatatgcaacgatcgagccgataccttgttcagttgtgaccaacaaaatattttgactaaacgcacctaaatcaaacaaagaccatggtgtatatccttttggtaaggtcaaataaactacagcttgagcattataaagctgattggcttcttcacctaaagtttcttgccaattatcccctaaaactgttggtataccacgactccattcagccatgttcttttgggcttgttcagaccagcgcttccgcgacattggaggaatatccgaattagtttttgctcctgtaattgccaattcctgttgttgctttctaatagcttccaaagtctcaccttgggctacataaactttttgcggttgcgaattgacccatgaaggtgctttttgagcaattccaatcatttcttttaattgttttgaatctattttttgatccgtaaaatggcgtacggaatgacgcttttgaattgcctgtttgacttccatcctgtctaaacctccgaatcgtttattgcaaatttagaaccatactgcaggttttagtatacgtcttaaagtccactttaagtcaagagttgaaaaagtttattactcaataatctaccaaattaactttatcagaaattaacatagctttattttcactttcaaaatccattttagcccataaaccataacgacccccaaaagctagaatcttagtctaacttttgagggccactataaaattatgttgtagttctttttatttatcagtattttctgcagcaaccttttggaattcggctactaaatcggcattttccgtaaccttaaagttcattccatcgctagctgattgagaagttactaatacttctggttggccattatggaacgtaaataagtacatgtattggtcaccagtatatacagctactaccttgtattcactgtctgccttttcacttcttgtccattgcatggaaacctcttgctggttgacatatatttgtcccttagagagatagtcagggaaacttactccaccgaaactaacggatgcgttagcattcgtacctgtgtaagtttggcccatggtttgttgccaacttgaaatgaaagctgccaattctgaatcttgtttgtcagtccaaattttcttttcagtctttttagtcttctttgaagaagattgtgctttagatgaacttgatttaccttcttcaactttgatcacttttgtactacttgatctatcagaagatgaagttgtgttcgtgacgtgattaggataaaagaacttataccctgcaatcacgacgattaacgcgagaataacccaaaccaccgaattgattgagccaaacgagcgcttttctggttttttcatatgtcgcataataatcacctcgtttagtctattatacagtaatttgataaattggaaattaactgtaattactcttttatagaggactacttaatttataaaaaatcacattacatcaaacctgacgtaatgtgatttttaattaccttctatctttcaacttcttgtaacttttgattgtcatctagttgagatttaccttctaaatgtttcttttgaagttgaaccatgctgaaccatagcaatgcaagagctataattgcgaacaataatagagctcccattgattgaacaaccgtgatatttcctaaaccagatgtaatggattgacggaatgacaagattgagtacgtcaatggcaagaatggatgaattgcattatagaaactgtttgtaacttccattgggaaggtaccacccgaaccaccaagttgaagcatcaatagaatcattgcaacgaatcgaccaggattatcgaaggccatcgacaagaacataacgatgtacatcgacgtcaaagcaatcataattgcggttaagtagtattgacctacatgatcaacatggataccagcaaccatcataattgttgcttcaatcaaggccattccaagagcaaccgctgtaccaactgatactttactcaagaaccagtctgtagctgtaccaccacgcttagaaatcttacggattgggtaagcgaagttaaagacgatagcaccaacataaagggctaatgaaagcacatatggtgccaaagcatgtccataatttggaacataactgtaatcagtttgtttcaaatgagttggagcagcgaacatttgagcagttttgcttgtaagaggaacactgttaacttgttttgaacccttttctaaactatctgctagcgtaccattaccatcactaatttgtttgctaccgtcaagcagctgatcagagttagcatctaattcacttgcaccggcatttagcttattaacgccgtcaattagttcacctgtacttccatttaaggtttgaagtccatcatttaaggtatgacttcctgaatctaactgttgaacaccgctaattaaggttcctgtacttccatttagagtttgaagtccgctattcaatgtgtgacttcctgaatctaattgttgaacgccacctacaagagctggaatttgaccatttaattggttaagtccaccagtaacttgtgatgatccaccaactaattggttgctaccagcagctaacattcctacaccactaaccaaggttggcatttgtgaactagcagtactgataccaccattaagttggcttacaccatttactaaagcagctccgtttccactaagttgagaactaccttgagttaattggctaattccagattgtaatgccggcatttggccattgatagtagttaaggctgtatcaagtgtttgagcaccgctagttaacttcttaacattatctgaactcttattagtttggctagctaaatcacttgcaccgttgttcaattgcgacacaccatcagataacttagatgctgagcctgagaatttatctacggcacctgaaagcttgcttgagctatctgagaggaccttcaagttatcagtaacactttgtgatccttgagccaagtctttaatcttagcagctaatgtggccatttcgtcaccgtttgcagaaagtgaatttattcctgaagcaaccttttggaatgaagcacttaaagttgcaatcttagcatctaaatcagcttgttttgaagataatgaattcaattttgaaacttgaccttcaacactactaatttcaccttgaattgctgaaattttacttgtatcaatagtttgtgaggttgtagttgattgggctgtgcttgcaccagaaccagcaacacttgctaaagcggccttagctttagctgcatcttctgcggatagaccagctccatcaattttagcgttgattgtagcttgtgatactcctgaggatgctggtgctgctttagtagtagtcgttgttttagttgaactagctaaagcaccgacatcactcttaattttatttagttggctactaattgaactagctgcactagaattgtttccgccagaaacatctgttttagatagcgctgctagttgtgaattgattgaatttaattcactcttcaaagcactagcttgcttactcatatcagatggagtaatttggcttgaaagttggttcaatccgttagaaacttggctattagcactatagagttgttttgaaccacccgcaatactatcaacagctgacttcatttggccaacgcttgatggtaagtccttagtattattagctaagctagcaataccactttgtaaagtggaagtaccatcagaaactttagtagtgtattcgttgattccactatttaaatcacttgctccagatgaaatttgtttgatgccacctactaattcaccagtattagcatctaatttttggataccactattaagttgataaacaccaccaacatattgaggaactgcaacatttagttgagcagaaccatcttttagttgtgatacgccagtaactaaagcaccactcttagattgtaattcagaaatacctttatttagagcaactgctccgttagtaacttgtcctgaaccattagccaactgtgatacaccagaagatagggcaccagttttgctgttcaactgatctaagccagctgataattgacttgaaccaccagctaattgagctacaccggatgccaaagttccagtcttactgtttaattcatccaagccaccagttaattggcttgaaccatctgctaactgttttacaccagattgcagaggagccacagaaaccgccattgtagcaattccatcgtgtaattgtgatacaccggccgtataagtcttagtaccatcgtttaattgaaccgcgccgtctttaagtttattagcaccatcggccgcgtctttgaaacctttaccagcttttttaacttgatcaaacatagctgtagcataagatttagtaacttgctcccgtacttgagagtttaacttttctgtacctacgtcactaattactttaccaatgtagtttagcgaagcattagtagaatacttcaactgcatctttttaggatttttatctgttacagttgcagcatttgctgagaagttcttagggattgtgactactgtatagtactttttatccttcattccttctttagctttattagctgaaacgaatttccagcctaactggtcatttttcttcagattggaaaccatctcgtccccaactgcgagttttttaccttgatactcaacgggtttatctaagttaaccactgcaactggtaaattttttgtatctccatacggatcccatactgatttcaagaagaaaacactatataggaaaggaatgaaaataattgccagaactgaaattaagattaacttatttttccctataaacttccattctttgcgaatcatccaactagtcccctttaacctttaatttatatatccggatatatgaatcatgatgtacttctaaaagatctatcgcaataacttcttatcttttctcaagatgtcaatcagttcttgaacctgagccaatgcgtctttgatcgtcaattggtaaatattacttgtcccaaccttgcggacggaaaccaaattgaggtcttttaactgcttgatatggtgtgatacggctggttgtgaaagaccaattagcttagttagttcactcaccgtcagccccgcatcactttcgccaagtgtaatcataatttgttgacggcgttcgtcagaaagggcatccaacagtgggatgttcttcttgaacgcagcaagagcagcattgtttttgaccatctttctcctccattcgaatattcgaatatttaaatacaaattagatcttaacgctaaatttaattcaattcaaccttaagattaactttaattatttttcttctagatcagacaataagtccttagccatcttcttggtaagcatagaaataatggcactatgctggagggaaaccaccgccgtttcggctaatagttcgttccacaaattacgcggtccatgttgagaaattcgttggacttcttcgttaaaagcatttacaaaattattgtaagccctccttgaactggtcaacttaagttcagcttcgaaccctcgtttaatttcatctaaactcaaaatgctttttaaacatccaatgatgatgacagcagccagttgcatccgtccgtacagtttaccttgtgggcgaataatgactgcttgcttcagataattatgcatcatcgttggtgttaacaaatcgacttctaatggacgcaaataattattagccaaatcaattacttggtccaaatgaagttcaatatttggtaattcatcccatttgggcaagctcattttggcaaaattttctaattgttttgaatccatttgatctccttcaatcaccttatttaataatttgtacaccaatgccaattaatcctggaccggtatgtactcccaatgcaggtgaaatatctccattataaaattttcccatattagggtatttatttttaaactcagtactaatttgattcattaacccctcattgagaccgtgtaccacagctaaattaaacttttgagcatttttaagggtatcatcaactaattgtagcatttttttaagggcttttttctccccatgtgccttcgccactggataataaattccctcatcatcacatgaaataatcggcttcaaattaataatggaacccaccaagccggcgacacgtccaattcgcccacccgcaattaaatattttaaagttggaacatagaaaaataccttcgtttgattagctacccgctgaacttcctcaacgatctgatcgaactcccagccttcttcaatcacttcacttgctcttactgcagcaaacccactagcaattccaatatttttagtatcaattacctcaatttgaagttgggggtaatttttagcatatattttaacttgctgtgctgttccagacaatcccgaggaaatgcagacagcaataatttgcgtaaagcctcgttttgacaaattgtctagtgcttttgtgattaattcacccttaggactggccgtagttggcaaaggattggacttagccaacttttgataaaattcatctggctcaatatttacacgatcttggtactcttcttccccaaagaagactcccatcggaatcatttcaaaatattcccgattggcaatttcagctggtacatcggaacacgaatcgaccagcaccgctattttttgtttaagcatgctaacttcccctttgttttaaaaactatctatctagttcataaaactagtataacaattccgatgactaacttagctatttaataaatttttcctagtactactagcttcttttcgttacattaaactaacgattggaacaatccggtggtattaaatggtagaatagttttaatatctttcagaatatcgaggtttcatcttgaataaaatcgaattagcaacccaatttatccaacgacacttacaccaatttcagtgtcccatctgtaaatcgaatttcaatgaagttcaatccgggactttaatttgtaataatcagcattcatttaatattgccaaaaaaggaagtctcttctttttaaataatcctgttaacactgaatatactaatgagatgttaacttatcgaaatcagtttttgacggctggttttttcaacccgatgttagaagaagttatcaataatatttcgggagatttaattttagatgcaggttgtggagaaggaactactactaaatggatggcatctcatttcgacggagacttcgtgggtttggatatctctaaaccagcgattaatattgccggctctggaattgctcctcaaccctatcctttatttatggtgggcgatttagctcaattacctttcacagatcaaggtttaacttcaatcgtcaacattttatctccagccaattatcaagaatttgatcgaacgctggcaacccatggtgaattaattaaagtgattcctggaaatcattatctaagtgaacttcgacaactcgtctatcctgatggtgaacatgcgacctatgataatgctccggttaaaaaccattttatcgaacactatgaatacgtcgaattttctaaaatcagctataaatttccgcttgatgacaaattattcacggcccttttcaatatgacacctttaacttggcaagctcaggatcgtaaagaggctattttacaagatggattaaaagaaatcacggcggaatttgaaattggtgtagttcgtaaataataaaaaggcttcaatcaacgttaacgaattgattgaaaccttttttctatattattaatattttaaattttattgtagtttttgaatgtacttggattaagtacttacttattcttgtctatttattttcaaataacatggtcaaacgtacctaaaaaatgtcctaatatcatgaacaatgtctcgcaaagcctgaaaaacaagttttagaatccatcaaacagcactgttatcctgaagtttgcatataacttaagttttaattgaaaaataattgggttaaaacaaaatgaatatcttagctggaatgcagatattcacaaaaacataattaataataccctttgctcctgtacccgaagcaacatcttcaaccttacgctattacttcagcagtgtcaaatttaacgaattaaagtttaaaaggctccaccaccggaaccacctccaaaaccaccagaactacctccactaaatccgccggacgaaccactggaactagctgatactgagtgtgaaatagaagtactaatactgttagcaatacctgcatgcattccattgattccataatagtaggcataaaatggaacattttcgtttaattgagttccaaaatccgtctttagttttttagcaaccttttctgccaacccaaaagcggtggcatatggcaaaatttgttcccaaagaattaagtcaccaatctccgccgtattaaaatgagcaatatccttcatcatctgtttaaatcctcggatttgattatattgctgcaatccagcctcgttatacattgaaaccttatcccaagtagctaaaacccaagcttcaattatcaacgttaagactattccgcctatccagtacaagttagttacttccccaaatcttccgataattcctactatgaaagcaaggattggagtagtaattgctagcccaagcagtccatgacgataactaatattatacgtatctttaaagcgggctaaattggtatcaacctcaaactgccactccttgtaccatgtagctacattattcttcttatcttttttagcataatcattaatttgcttgatagtaacttgttgaccatcaccaatgcggtccaagcagcgatcgacaaaggacatgttgaatttaccttgtcgctcaatttcagtggtttccttacctcgcttgccatagggaatctgtttgaacttcaatttaccttcagccgccaaaactaacatttcagcagaaacacccttagtatcagctttactcttgttaaatagcgcttctgcctctgctggtgaaatgctcgggacgtcaaaactatgttccatgggcgtcgggatatcatattgatgatatccatgtttttttaaccaacccatcataccgattaaaatcagtacacttatgatggcactggtaattttagcataagccgcaatgcgtcgagctcttgcttgggcttcattttcacgctttaccagttgatattcctgtttttttactgctgctagatgattttgattaacaatttttttattatcgggagttaaagccgtgggaaataccatatgtgcttccacaaaagtgttctctggattgtctcctatatctaaagttactttacctttagctttatccaccgtagtgtagcctgcagcctccccatgagaccaagcatgaagtcctttaacattctttccaggtaatttaatggtaacttgcgcatcctctaagggtacgtcccaacccgatccaattactttccaattaatttcagctgtatctttgtagttggtcaccaccccgttaatccgataatggtacgtaattttggtttggtcatcacttgatacagcattataaaccttaattttcatttgctttttacttgattcaactttagcagttaaattttcaccgctgttattaataggaacttggttttgggctcccttgttattagaaacggtaatcccctctaattctgctcccgcggttcctcttaaatcttgagtcaaataaactccatgataatcatcatcaaagtcgtacaaaacactttgattgatgttggcgctcccatccttatttacattaatctgcattctaaattgtgaaatttcgtaatccgccttaactgtcttaacattccaaaaaataccgaaggttagcatcgtgactaacaataggaacgttctgttcgtaaaaaatttcatattactcccccaaaaattgttcaataatccccgttaaatgttagtcaaagtatagcatacgtgagcaggtgcggacgatggtagaatctgtttcagagttgataaaaatgcttttctaagtccttcgatatttatatctcggctacctttcataccgacgtatcaacgataacgttatgactaccgcattaattaacgttgttaaagctgtcacaccagcgattatcgaaaacgttgcaaagcacattgatgtaaaataccccatcaatgtaacgacgatgaaagcaacgactacataattttctaactttagcgtagttttgttgtaataacttgcaataacaattccgatataaaatagcgctatccccacatacagacacgtaatcgaaaatatagcattagcttcagattcatggataaaatccaaggccaccgtgactaaactcaagccaaacaaaataaagtaatgtaaatatattagtaaatttccagtttcatgggtacgctgttcttcaattaaatgatcaaactccacaatatacgtaaaaaatagactaactacaattataaaaatcattatggattgaattgaaaatgtattttgcgtgaaatattttgaaatacctacgatggtttcaccgaacataataataatcaaggccgttagtcgtcctaataaatgagagaaaataatggggtgcttttgagtatgtttcccggtaaaagcgggtataatccaactagtgataattccaaacaaggcaattgtcgtcccccatctgccagccaacactccccccgctaacaaacaagccattctaaaaaataaaattctcataaaagccatcgcaatgtttcggtcatactcatttttagtttgtacaaaaactagtaaatattgaattgccaaagttagtgataaaagccctgctgctataaagaagccaattaagtgtcggtcaaacgtgtcggaaaaagcattcgacatataaagtgcaatcgccatatcgacaaaagataaaattacattagaccattgggacttcccatagcgattattaaaaaccgtctgaaccatccacgaattgatcgaaacgattacaactaaagtaaagatacttagtgcacttgggctaattacaccattttgtagatgatggattaaccctgttacttgtgaaatcatatatacaaaaactaaatcgtagaaaagttcgatcatcgaaactttttttaacagctcatttttcacaaaaatcaccttcattatctagagtctttatggatatcatagcaaatttacccccgtaaatttagttaatttatttttttaaatgtaagcattttatttgagctatatcaataaaacctttaatatctgaaccacaaaaggagggattgtataatgtttaaacatcaaaaggaactacagtttgaagcaaaaccagatcgcccagatccaatcgttgctaagtaccttcaagaattaattgggggacaatatggtgaaatgagtgtggccatgcaatatcttttccaaggctggagttgccgaggagaagaaaagtataaagatatgataatggatatcgccactgaagaaattggccacgtcgaaatgttggctaccatggtggcacgacttttagaagatgctcccatcgccgaccaacaagctgctatgcaagcgaatcccacagttggagccatcatctctggaatgaacccccaacatgctattgttgccgttttaggccctcgccctgctgacagcgttggtaacccttggagtggtgcctacattattgctagtggtaacctacttgccgattttcgtgctaacctcaatgctgaatcccaaggtcgactccaagttgctcgaatctatgagatgattgacgaccaaggtgttaaagacttactttctgtcctactagctcgtgacagttatcaccaaaatctctgggctagtgcggttaaagaactcgaagaaaaagaggattcaatgttagtaccgacgactttccctcgggataaagaacgtaaagacattgcttacgatttctacaacttctctcaaggagatgaaagtagtaccgggccatgggccagtggagaggctttggatggcgaaggtgaataccactggtatgacgaaccaaaagtagaaggttcggctcctaatctaaaacccgtttctcctaaaatgtatggaacccctgaaaataaatcaaaaatttaaataagcgaaaagcgaaaaaatcataactgattttttcgctttttttaagcttttattttaattttcttggggttgcgaaatagtaaccttgctgtttttctaaaccattttctaagagccatttactaacttcaagactatcaatcccttcaattacaagatcaattccagtatttgcagctagtgctttccataaagaaattgtaactgtaatcatcccttcttctacatttcgtagttgaattagtgatagcttgagacgatcaatatcctgcgtgtattcacgaacggcattaaaactattcattccactacaaacatcatcaactgcaacactgaagcccatttcatggattctcttaatttgatctcgtacagaataattgaaatattggtcaatatcacggttactagggatactttccgtaacttcaatcatcacccgatcacaataaggaattaaacctttcattgcttcaaacgtagaatcatataatagttgctgcgggtcgaggttaaagctatattggataccaggattatcgttaataatctcaatgatgtttttaactaaccatgtacaaaaaactaaatttgatgcatcatcacgcatgtattccttatatagcattgcggggaaacgattctctccaccagtttttctaagtagtaattcgctcccgatgacctttttttcttccttttcggccgcatctatcaaaaaaatcggttgttcatagaagcaaattccttctaatttttgttcaagttcgctcaatttagcgaggccacctttccctcaaccgtaatactattacgtttgtttctcttagattgatacaaataatcatccacacgtttgtagaatgtttggaaatcaaaatcatcatctcttaattgagaaataccgattgaaactttaattccaactcgatcatgattgttaaccctaattgtttcttttaccaaatcatcgcggatggctcttacaattttttcacaatcatccgcagtacggcctcgaaaaataatggcgaattcttccccgccaacccggaatagttggccatgagctttacgatctacaagttcatatgaaaaacgatccgcaaccaaccttaaaactttatctccaacttgatgaccgtattggtcattaaattgtttaaaatgatcaatatcaaacattaccatggttaatggcgcatcattattagaataaaattcgaatacgccttccacaaccttattgaagctattacggttataaactcctgttaacgcatcagtatctacttcctgcatcaagtttaaatactgcttcatgatcattctgacttttttgttaccaaaatggacgattgacattgcgattaaaaattccaaggtcaagcacataatatcgacgatagttagatgatgaatatccttaagtacaaaccaccaagctaatccaaacataattaacgtactgtaatatttaacattctcatcaatcaaagtgtcattttgctggtagattgtgtatgaaattaagataattaccaagattgctaaaataggagcaatatcaaatcctatttgtccacgtactatccctaacccgtatacatacatgggtaaaataatattaaaccacagtacgacttttctatgaacaatatataggcagtagaatagcaccacaaactgagcagttgagtattcccaacctaactcactactagcaattgttgagtacaaatgagtaaacacgttttgtaagaaaaccatcgcgattgttagaccaacaccccatagtagttcttcaatgagtgttgaacttgtttttgttttatccatattcatctcaactacgtaggtacctgcagctaacatgaataatactccgaccgtaattgccgcaataactaccgtattaaaactaaaaaaaacttttgcccaatatatgattgtattcattacagtattttccataagtttttcctttactactccatatcccctattctctgaacaatttactattcctcaaaaataggtatacttttaacactgaagtccttttcttgttaagtaatgctcaaaattgtttaaatcaactttcaattttgtattttccaccccgttttttgtatggacttggatatttaaacgactgcaatgcaatttcatccaagtatttcagatgaaaacaagaacgacataacaccatctagtgcattcgtccttgcctcattacatttcataaaatcattaccctttggactaaataatagacttgaatacgctatctatatctccaaagcaaacggaatttcatttttcgtagcttataaaagaatagcatatccatttttggaaaacaatccaacaagggtgtttaaaatttgtacatacatctttttatatagcatacaactttttaagtgtataaaaaatatctattatcattaataattaattttaaatattatgatttccaatcagaacgatgtttcttatatttatccccaaaaaaatcctttcttcatctctgccctaagttgtaatctgactaggcgatatatatactaaaatattactagcgtttaattacttaaattaaacttttagcttaattttaagtgattacctcaaaggagaacaaattaattatggaatcaacatcttttgttaataatccagaaatccaaaaacgtcggtggtggattttaattgccgtatgtagttttactttcatgtcgactttagatggtagcattgttaatattgcattgccggtcatgagtagtactatgcatgttcctatgaataaggctgaatgggtcgtttccatttacctcattgttatctgtactctcttactcttatttggaaaattgggtgacgctcatggaaaaatacgggtctttaaaattggtaccatgttatttaccataggatcacttctatgcggatttaatactggtttaacattcctattgattgctcgcattattcaagctgtaggggccgctatgacgatgagcactaataatggcatcattactgaagttttccccgcccaagagcgtggccgggctttaggaatgattggttcatttgtcgcccttggtagtattgctgggcctggaattgggggattaattctagcccattttaactgggggtatattttctggatcaacgttcccattggattattagccattttagttggtcataaaattcttcccaaagatgtaattatgactcatcaaaaaatcgacaaacctggtacgatcttatttgccatcacgatgattaccctattcgttggtatttctatgggacaggaagtcggttttacccagccactgattctaacaatgttgttcgttgccttaatcgccttgggcacttttttatatgtggaattacacgttgaaacacccattttagctttatatattttcaaaaatatgcgttttaccctcagtattatctgtgccttcttaattttcattactggatttttctttaacgttatttctccatttcacttagagaatacacttggtttgcctgctaattatgctggatataccttgatgatttatccactgatcaatgttgtgacagcgccagtagccggtgctatttcagataaaatcggatctgaaaaattaacttttgttggattactcattattttaaccgctcaattaggctacatcgtcactaatttggcaactcctttatggcttttcatgatttttatcggtttaaacgggttgggaaatggtattttccaagctcccaacaatgcacttgtaatgggctccgttgaacctaaagacttgggcattgctggtggaattaattcattagctcgaaatctcggaatggttgttggaatttcgtttgcaaccactgtattattttccgcaatgagccatatcgctggacatagtgttacttcagttgtaccggggcatcctgaaatttttattgctggaatgcatgtagcttttaccgtttcctttggtgtttgtttaattgctaccctaatcaccggatatcgtttgttgcggcgtcaaaaataaaaaactggaagcattttaggttggttaatttcacctagatgctccagcttttttattttgtagtagtagatgatgttgttgtacttgtcttagtcaatgtcactactgttgttttatacttgccatcacgataatagcccaccgtgattttatcattaatcttgtgcttgtatagtgcctcacgaagtccggctgtatcagtaattgccttatcatcaatcttagtaataacatcgtatttcttcaaacctgctgttttggctggaccattattaacttgcatcaatacggttccgtccgttacattagaaggtagtttaaggattgatttttgctgtgtagatgaaacttgggttaaatcgactaaagcgacacccagcgcaggacgtgtgattttaccattcttaaccagttgatcaataatggttactacttcatttgaaggaattgcaaatcccattccctctactgtagtagaatcactcccactagcagagagtttcatcgaattaattccgattacttggccagctaagttaattagtgggccgccagaatttccggcattgatggctgcatccgtctgaataacagttgcttctccattattctgtccattttcagtggtagtttccaccgttcgtttcttagccgaaataattccttgggttagtgaggtggcatattctgatcctaatggtgatccaattgccaaggctgtttcaccaactttaatgttatcggaattaccaaagctagcaacggtggtaactgctgatgaattaatcttcaacacggccaaatccgttacactatctgttcccacaatcttagcaggaagttttttaccattgctcataataatctcaagtgaacttgaaccacttactacatggttattcgttacaatataggctgtgtcaccactctttttatagataactccagatccttctgaggcggtctctaattctgaagagctacttgatgatttgctagaagaactcgattcgtttccaaaaattgagctaatgatactgtcagaatcattagtattagccttttgtaggttaatcactgaaaccactgaatccttaattgtagagaatgctttggatgattgactacttacgttaactttaacattactagtcttggttgttcctgtggtatttgagcccgttggtactgctgtactagatgattccatctggttatgaatgaagctcgccccaccataagcaacacccccacccagtaggcccgcaatggctgcaacaatgactaatttgtttgttttcataagaatgcgcggatttcccgctcccccctcatacaaaatttattttaaatttattgtacatggtaaatacgatggttatgtgaatttagtcctcaaaaatttgaaatttttattaaattaaagttaagggatccgcaatttcgtggtcagtatctaaaatttcgaaatcgtgtccaaccgctaaatcgtgattttgcatcatggaagatactgttagatgcgctaattctttcatattattatggaggcttaaatgacctaagtagatttttttagttcgattaccaatcacgtccattagagcgttggcaccatcttcattagacaaatgcccgtggtcccccataattctttgtttcaaaggccatggataaccacccattcgtagcatctcagtatcatgattaacttcaaaaagataaccatctgcgttcctaatagttccagcaattcgatcagaaacataacccgtatctgttaaaattacaaatgatttacccgcatggtggaattcataaaactgaggttcagctgcatcatgtgaaactgaaaaactttcaatatcgaggtcatctagagacttagtagtattaggatcaaaaatgaatttttgctcagttggaactttgccaattttaccaccgatggcatcccaagttccttggttagcatagatatcaattccatattttcgagctaatactcccacactttggatatgatccgaatgttcatgggtaacaaaaagtgaatcaacttcgctaatatcgcatccgacgctgtccattaaacctgcgatttttttaccacttagtccagcatccaccaagacttttcgttctggcgtttcaatatatgttacatttcccgtactgccacttgcgagtacgctaactttcaaaccatcttcgctcatttctagaccttcctacttaatttaacttaaattgatgcaaaaattgaacttcaaatgaagttcgtaaccgacttaatatgtggtgctcgtactagttgtagcttctaccccagcttctgtcgttgctgaactggttgagctggttgtactagatacatcactactagcactcgttgcctccgactcagaagttcccgtgcttgaaacactactgctatcatcactcgctgcggtactaccactcgcttgcgtcgaggactctgtggttacttcatggtcctttttaatcaagacccctgaaaaagcattaattcttttcacttgaataccagtgctactcttactcttaattccgattacccatgtcggaacatatactactccgttatcggtggtaagtaaatttgtataacctaaatcggcccattccaccttggaatcattttgaatttcattatattgatatagccacgttactgctcgagtttgactaatcagttcgctcttttctcgcagttgtttctcatttaccaaatgtccttgcgtataaccagtaacttcattgctagcattaacataaaaagttagctttccagccttggaatagacggggtgtccatcaatcatctgcgtataaactacttggacactggtacttaaattagggttgtactggtattcagagccataaacgatgttgtagcgattcttgacgaatgtattaagtactttttgcggttgtttaggatcgaccgtaagttcctcattcaaagtactttcaacgtaattatcaactactcgtgcgctttggtcagtgagacgtttgatattatcctttaaagatgtgtcgactgtcgcacttgcatagtaaccgttcatttttttatttgaaagaggcatataagtaatctggtcgtttctcatttccttcagtatcgtcgaattttcgcttgaattcgacgatgaagtcgtcccagcttctaattgatattgccagtaggaaccaaataaataggcattcaaaatagcgaatacaacaataaagatgacttcgattcttctgaaatccattttgttcctccttagctaactaaatcgcgatatgacgtccagtcgccatggtacttaataaaccaggttggttcaagttcaaccgttgaattagctttagttgtacttggacgttcatatccaatatcaatgtcttcaattttatcagtattaattccgctatattttaattcatccaacatatcttgcgtacttggtagctccttgtcactctttgatgtgggaactggaacgtcaagattatagattgaaaatgaggtcgtggtttgttttgcttggtgagcgactttaatcgtatccagaccgtctgcattgaagatcgggaagccttctacaaaatctctaaattcgatttcatgattattttcatggaaattgaaatagcgcatgttgcccacttgtacccctagttgtttcatctgataaaaactcaactctagatttcgctttaagctttcttcagtatcattagctttgctggcattattaaatgtcacaaaaccattgtttttaatcagcaaacgtttggttgtatcatttgagacatattctgtaccatctttagttttcttcgtatcaattgaatctgcatcagtatttgttaacaagttggcagtgaagacgctactgctctctttattaactgaaaaactataataaggtaccttaattgcagtttgataatcattaatcagattatgattcatgatggtttctttcactttatactgactatcactctgcttaatcaatttgcgtaactgctttaaatcttgtttagaagctttagcttggtaaacgtcataagccgcatcatttaacaggaaaaactcgtttggcttattcacgttaactacaatttggctaatttcagcgtttgtatttaacttttgatcataaatactattgaaaattttcccagtgatattacttggatatttcagcatcaaactgtgacttaacgtagcataatccaaaaaacgttctttattacctcttgaaacccgagttatgtttgataatttccaactcgaaatttctttaacagctgccttgggaaggctacttttagaattattaatcaattcttgttgttctcccttggtatagataacctgcgttggtaagataacatcgcctttatcccgattaacctggtttgattgtactttttcactggaaacctgcttagcgcgttcataccgagccgggttagtccaaattacccatgaaagcacgatgctagttaacgctaatattaataaaatgacatgtcggacaattttacgcgttttagtatctttcattattcccaagtatctccttcctcaaagggttcatatggaagtgaaatgtagaaggtagatccttcaccttcgcgactttcgacccaaattcgaccaccatgaagttggataacttcttttgaaatcgccaatcccaaaccagtaccaccttgagcccgtgaacgagccttatccacgcggtaaaaacgatcgaaaatatggctgattgaatcctttggaattcccaaaccttgatctgtaatactcataatcacgtgattgtgggtctctaatagccgacaggtaataatccctccatctggagaatatttaatcgcattattcatgatattatccaatacttgttgaattttatctgtatcaacttcaacccaaatatcacgacgcgtaaagtcgcgtttaatagagtaatttttatctggtttatcactatttttcagaatcatatcgaaacggtccaaaatatggttgaataattcatttaggttaacatattcacgttccaatctagccgttcctaaatccatacgtgataaatttagtaaatcattaatcatccgcatcattcgatccgtttcttcttgcgtaaccttcaagaaattaggggccacttctggatctttccaggctccttcaaccaatgcttcaatataactcttcatactagtcaaaggggtccgcaattcatgcgaaacgttagaaacaaatcgttttcggtcttgatcaattttttgctgttcagtaacatcatgtaaaacacaaaccagaccactaataaagcctgattcacgctgaattaaggcaaatgaagcatgtaaaattaaatcttggtcatcatcggaaagatctaaaacaacctgctcttgattttcaagtaagtcccgtaaagtaaatgttcctcgtaaatcgagaatgtctaaaattgatttcccaacgatttggtcattttcaagattcaagaaatccgttgccatttcattaacgatagttattcgtccgcgtcgatctgtcgccagcaccccatcagtcatatagcccaagacggaatcaagacgccgccgttcagattcagtcgattcctgagattcttctacccgtacagaaagttcattaacagcttctgctagttggccaagttcatcatcaccataaatctgaacctgaccagaataatctccacgggcgatttgaatcgttcgttgccgcatttcttcgataggacgggtaatcgctcgggaaattaaaacggctaaaattagtccaattgtaatcgcaattaaagcagctactacgaaaattaacgtaatattattaacattttgatataccgattctagattagcgcgtatataaacaacacccgtcaagttgttggttgctcctgcagtgttaattaaaggaacaattgaaacaaaataacgcgtgttagtggttttattgtacgaaacttgttgataggttcgcgtattgtagattacatccttaacattgcgatccgttgtcttttgaccaacaatattctggttagtactattactcgttccccgaataacacccttggcatcaatcactcgaatttccgtgatattttgattattgatgtttccaatgatatcggatatttgtgagttagcgctcttcgtattagcacgttctaattgtgtactaatctcattttcaacataaggttgtagttgaacttgagtcttaaattgattcaagttttgtgtttcaagttgtcgcacaaaaataactccaacgacttccaacgttacgactagcaacattgcaaacactagagctattttaaagttaattgatttgaaaaaattcgttcgtttattcatttagtctccaaaaatcctgaattaattaatcattttctggattacgtaaatagtatcccactccacgacgtgtaaccaaaatttgagggtttcctggggtttcttcaattttttcgcgcaaacgacgtacggtaacatccactgtacgaacgtccccaaaataatcatatccccaaaccgtttgaagaagatgttcacgagtcatcacttggcccgtgtgttgagccaaataatgtaaaagttcaaattcacgatgggtcaaatctaattgcatcccatcacgagtcactgagtatgaatctgaattaatcactaaaggtccaattttaatattatttttaacagtctcatcatcttgctgcaattgatcctgacgacgaaggttggcttttacccgcgccactagttcacggttagaaaatggcttagtaacgtaatcatctgcaccaagctcaagtccaacaaccttgtctaattctgaatccttagctgttaccatgatgattggaatattatgttttgctcttacttggcgcgcaacctctaatccatcaatttttggtaacatcaaatcaagcagaatcaagtcgggcttttcttcttcgacttgggcaagagcttcctcaccatcatatgcagtaactacatcgtatccttctttatctaaattaaacttaactatgtcagaaatcggtttttcatcatctactactaaaatctttggcatgttagccctccttggaagatttatctgccatcaggtatgcattcctgataaaaatggtccaatccattaatcttggttaattataacatatacactaaaatcaatcggaaacgctatctgtagcacgatttaaatcgtttttgcatttttttaatttttttcgaaatttttttaaaaaaagtattgccagcccctatttttcatgatactatatttaagtcgagttgatacatattaattatatgggtggttagctcagctggcagagcaacggactcttaatccgtgggtccagggttcgatcccctgaccacccatcaaacacacgacacactaatcagtagtcacgcagcgtaaagccgtggttactgatttttttgtgcactaaaaaacagtggataaccttttccactgtttttttcatacctatttttccacttttaatacgtactagctacctgcttactaattacccatcgcccattgttcttctcaaaatacattttcatttgaagaggccaaacgttcttcgatccgccccagattttggcggttactaaattttggcccgttaattgtcccaaatttccttcaactcgaatatctttgatagcttcttctttggactccaagtactgcatttcttcattttgtatctgatcgatccattccagtttaggttgcacgtatcccgtcatatgcgttaaagtcattcgatcgcctaaaatcatatctagtcgacttatatcttttttcaccattgcttcattttcagctcggtatagttgaacaatttgttcttcatcttttgtcatagatttactcctttgatatctttctatcctatatggtatctataattaagaagccgagctattctaatcttaaccctattaaataagtaaaacttatttaaaatgatgctcaaacatttcggcaaaagtttcaatataaaaccctgaattatcgactttccagtacatataatatttctgagtcaattcatgaccaccattgtgcaaaggtacggtttgaatgattccactatcgagtaggttttgggttcgctgattaacaattaaatatccttgattagctgcaatcagcatctgggcttcatcgtagttagcaactaatcgaaagccacctttaacacctaaaatttcttgataatatgtttcctctgccagttgttgctttgaatcggtaattaaaatacatggcaagtcagctaaatcagccacatcaatttgctctgcgtggctaaattcccccgtttgacttactgcaaccatcaatccactttctgtcaaaaaatcatttacatattcattggaaggggctcgccgttgatcagaaaaagccagatcaattttttcttcacgcaaccaatcatacaattgttcatgcgttccattattgattttaatttttacttctgggtaagatttagaaaattcagcaacggtttgtaagaactccgttgttccaaaacttttcaaatatccaactcttaattcaggttcgttatcattggcaattctaacagtatctttaacaatttttttaacctgtcctaaaacatccctactatgctgataaaagtactgtccagctggggtaatttcgaagctccgaccctgacgctttaacaataaaactcctagattattttcaagttctttaatttgttgggaaatagccgattgagaaatattatcgtcaacagctgcttgggtaaaactgtgtgcatcgaccacatcaataaaatattgcatttgttgaaacattagtttacctcacttcatggatttacctcattataaaacaaaaagagctgaaacaaatttcaactcttccttaaatataatcattgaggggtgttaattccaacactatcccgtgaatacaaggtagcatccaaagtgagtcgttttacaagatcagcaattgaactaaccgaaacatcatgtcctccgaacggttctccttttaatgtaacttcgtaatctactggaccactagtaaaccaacctggacgaattacggtgtaattcaaatctgaagcttcaacaacatcagctgcttgtcgatatgaacttaggaccgaattatattctaaattcccattgcttccaattgttgctggaatctcattatagattcccatcgaggtaataaatagcaagcggtcaatctgattacgtttcattgctgatacaatattttcagcatatgttcctaaattaccactaagcgctacaaatacgacgtcttgctttttcatcgcctggtctaaatcatgggcttggtttacatcaccagccaccactttttcacgactaccggtttttaatcggttggcacttcgagcaaaaagggttaaatttgcatctgtttcacttggtaaagtttgtcttactgcatttccaatcgttcctgttgcgccaataattaatacgttcatgataatccctctctttataaaatcacttattttttaagaccgatatttaaagtagctccgactgaaatcaacataaatacggccataatgatgatagcgtggtcatatgataatactgggctaattaaattagctgtcagcgcggtgataattgaaagtcccactgaactaccaatttgatgaaccatgtttactacacctgaagctgatccggcaatttccctatccgtatttgctactccgactacggttagagggctcaaggtaaatccttgaccgataccaataatcaccattggaatagctactgaccaccaatatcctgcttgtatgcctaccacagcggcgaaaaccaatccagctaaggtaattaccgttccagcaattaaaatctgagtattagtaaacttttcgtttaaccgtgataccaatgtagcaaaaacaaattgaggtagtgtttctggtaagaatcctaccgctgccattaatggcgtaaagtgataaacctgttgcatcgcttgtggcgttaagaagaagtatgaaatcattgcacctaagaaaaagaaccttgcaatataagcactacttctttttcgatctttaaatagttttaatggtgtaatcgggtgcttagaaactttttcttgccatacaaataaaaccaaaagtaaaatcccggtcataaccattggtaccggatgactagctccattaattccataaacaagcgcagtaattcctaagactgacaaaattgaacctaaccaatctaattttccttctacctttttacttgctggaatatatttgagtgttaacacaatcatcagtatccctacaggcacgttaagtaagaatccccagcgccaactagcgtaactagcaatcaatccaccaacaactaatccaatgctggcacctaatccaccagtagcaccataatatacaatcgctctggttctcatctgatctcgataactatccattaacaaagctaaagtggttggagcaagaattgccgatccaattccttgtaaggctcgcatggcgataatcattgaaccattagttgataaaccaactaataaggatcctatactaaagattaccaacccgattaaaaagacatttcttcgaccaaaaatatctcctgaccgtccaccaatcattaataatccaccaaaggttaatgcatatgcattagttacccacgataattccgaagccgacaaactcaagtctgctgcaatctttactgtacttgtaaaaacaattgaattatccaaaagaatcataaaataactaattaaaataattggtaaaaccataccaaatttctgcttgttcattcctatcacccgcatccaaatttttattatgtaattattctacaagctcccccattcctaaccaatttcgattcttgccgcttttcataagtttttcttatggataatcagggttatcccatgtaaacctgaaacccattaccatacaaaaaaccactactatatggaaaattgcattccatcctagtagcggtccataaaccaagaacaatctatcaattattcaatttcaccacggagtacccgatcaatcatgtccattactccactatcgttgttatccaacggtgtaaccaattcggttgcgtccagtgcttcttgttctgcatttttcatcgcatagcctagtcgcgcatgatgcaacatggcttcgtcattttgggtatcaccaaaagccatcgtttcatccatcgaaactttccaacgattttgtaattgctgaagtccatacgctttagtaacatggggcatcgtaatgtcgattccattgaaaccgctcatcacacttcccaagctatctcctaaggcgttttttaacagtgcggcttgttcacgcacattatcaatatcaacccaatgggcatcaatcttataaattggatctttaatgtccttaaagtgatccactggggttaattggctgtaaaaatacgagctaacgggccattccggattatccattttcatattagtaaatgcacgatgttggctcgacagaatcagctcaacgcctttaaacatcggagtcgtcaataagtactcaattgtgtcgtgtaataaagccggttttagcggattatcgtctaaaattttcccttgttcaatcgtaagggcaccatcttcagcaacaaaggttaaatcccccttaatgccagcaaatacttcctgacaatgagccatctgatttccactcgctactacaaatttaatttttcgttcattaagtttgtctaactgagcttgaaaacgttgatggtcaaaatcctgttgatcatttagaaaagttccgtcgatatcacttgcaattaattgaatacccatggtggcctcctacatattaacttttttacaaattattttttactagggttaattggtttttcaacctttttaccaacttccattttgtcattgtagccccaaacataagctgcaataaaggcaataatggtagatacaactgaggaaatcaagaaaatccagaagctgcttaaatcagacggattgcttggattaaagaaggatgcaaaaccaatccatgaaccggcaaatccgtacatattaccatggaacaacccggttataaatccaccaaatgctgaaccaatcaatccagaaatgaagacccttctatagcggaggttaaccccgtaaatagcgggttcggtaactccacaaaaggctgaaatggcagccgcaaatgataaactctttaagttagttttcttagtcttaatcgccacggctaaaacagctgcaccttgtgaaatcatggtttggcaaatcaaagcatttaagtaactgtgtcccgtggtagctatgtcattaactaccaatggagtaattccccaatgcaagccaaagattaccaatacttgatggaaaccacctactagaattcctgatgcccatccactatgaaccagtacccatgaaatcattaccgcaatccatttagaaatgccgacaatgactgggccagtaatataaatcgtaattccactaacaatcagaattgtaataaatggaacaaaaatcatggttagataacttggtaaatgtttcttcaaataattttcaattttaaatgccaaccaagcagctaaaatcatcgggaaaatcgagtatgaatattggaccattgggaagttaaatccacccaacatccctaacgattttccagccaacggagttagcgtagggtgtaccaataccccaccaattacggctgcgatgattggatctccaccaatgcgttttgccgcagaaaatcctactaaaattgggaggaagaagaaaactgaatcgccaatggcatttaatatgatgtataaattacttttaggacttagtagttccccaatctgtggcatcgttaagactgataataatcccttgagaataccagctgccgccaatgaccaaatcactgggctcatcgaaccagtaattacaccaataaagttattaaaaccatcttttgctttttccaagaaattccggttatcaggtccttgtggttgcgtagctttaacagcttgttcggttccttcttcatccccaaattctgtccctaattggtcaataactgcgtcataaacatcgactacatctggaccaatcactacttggtattgaccttgagcacgcataatatcaataacatggtcgtcatttcgaataatatcatcgtcgggtttattaatatccttcaaataaaagcgtaaacgagagatacagtgaatcacactattgatattgtcgggtccgcccactgcatcaattgctttttgagctgttttttcaaagcgattaccttcattacttttagaacgctccactttttctgaaaccgtttttaattttagatttgcaacattttttcctacttcaactgtatcagcttcaatttccaactgctctaacacttcactgctattagtgattgcaaagattatagtagtttgcttgccattattgcgcactaaatctaagtcccaagttcctaggctacttcctgcttctacatgatcgccaacttgaactttaagatcatatggggtgccctttaattctacggtatcaattccgagatgtagcaatatttcgacaccactatcagttttaataccaattgcgtgcttactatcagctaccatcattactgtcccagccacaggagcaactagattaccgttagtaggttctaacccaaaaccttcccccatcattttttgggcaaaaacttggtcttctacttgttcaagtggaatcaccttaccacttgctggtgctacaactatgagattatcatttgtttttttcataagattattcctcacatgctctaatataatttcaatatatttgtaagcgcttgctatttaacatgcttttatcataaacttgtatatacaagatgtcaacaataaagatagcgcctttaattacaggttattgataaataataaattatattaccttgtatatactagttacatcatgttaaaatgtaagcgtttctaagaaaggggtagctcttgtatggaaagtaaatatgatttaataaaacaagatatcgccaataaaattattcatggtatctatcctgccagttcttatttacctagtgaaaacgaactttgcgacctatatggaacttcacgtgaaactgttcgaaaagctttggtgctcttgctagaactgggctacattcaaaaaattaaaggcaaaggatcaatcgtcctcgatgtttctagatttgttttcccagtttccggtatcaaatcgttcaaagagctcaatcaatcacaaaatatgcattcaactacaaaagtacttacattagagcctcgtttggtgcctaccaaggattttggtctcgatcaaaatagtgagttagaagctacttatattgaacgtttaagaaccattaatgatgaacccatcattattgatatagattacgtactctcaaaggtggttaatgatattccaaaaatggctgctgaaaattctctgtatgaatatttcgaagaccaacttggactggatattagctatgctactaaaaccatcacggttgaagagcctactgaacgccaacgtcaattattaaaaattccaccacacaaagacgtcgtagtaattcgaagtatgacttatctcaatgacaccacgttgttccaatttaccgaatctattcatcgagctgataaatttagttttgttgatttcgctagaagacaaaaattgaaaggacactaactatgaattttaaaaataaggttatttaccaaatttatcccaaatcattctatgattccaacaacgatggcattggagatttacaaggaattatcaaaaaaattccttatattgataagttgaatatcgatatgatttggttcaatccttttttcgtttctcctcaatacgataatggttatgacattgccaatttctatgaaattgaccctgtctttggtacgatgtcagattttgaagaattagtccgtaaattaaaggaaatccatgtcggagttatgctagatatggtgttaaatcatatttctactgagcatgaatggtttcaaaaagccttagctggcgacgaacactatcaaaaatacttctacattcgagatcctaaaccaaatggtgatttacccaacaattggacttctaaatttggtggaccagcttgggctaaatttggtgataccggtaaatatttcttacacttatacgacgagcatcaagccgatcttgactggcataaccctgaagttcgccaagaaattttcaaggtcattaatttttggcatgccaagggggttaagggattccgctttgatgtaattaatgtgactggaaaggacgtagagttaaccgacgctcctgagggcgtagaatcaaaatttatgtataccgatacacctatcgttcaaagttatcttaaggaaatgcatcaagctgcacttcaagaccctgaagtaattaccgtaggagagttttcttcagcttcagttgaaaatggtgtgaaatatactcgtccggaagaacatgaattaacaatggctttcaccttccaccatttaaaagtagattacgaccacggacaaaaatggacgaaagttccttttgactttgctgcacttaaaaagacgataaatacttggcaagtgggcatggatgaaggtgatggatggaacgccctcttctggaataatcacgatcagccttgggccttaaatcgctttggagattctggtaaataccgagctaagtctgccgaaatgctcgccaccacgatgcatttacttcgtggaacgccctatatttatcagggagaagaaatcggcatggttgatccagattaccaaaacattgacgaatatgttgatgtagaagccttaaacgcttatcaacgactcttgaaagaaaataaatctcctcaagatgcacttgaaatcgtgaagtctaaggctcgcgataatagtcgagttcctatgcattgggatgattccaaatatgctggcttttctgaagttcaaccttggttaaaaccaactaagcaaactgaaatcaacgttgcaaatgaactagaacacggtgaaatttttgcttattaccaaaaattaattcgacttcgccgagaattctccattatttctgaaggagattatcaatcctttgaacttaatcacccttctgtattcgcttatattcgtacctatcaagaccaaagcttgttggttctcaataacttctatggaaatgatgctaccatctcaattcctagtaaatacacaactgaaactgctaaaatcttgattaacaactacgagactaatcctgaattaacaacaacgctgaaattgaaaccttatcaatccatagcaattctgatttagtgcaataaaataagtccttcaagttaactaagtagcttgaaggacttttattatctagcattaattttaatttcatgtttatacttgcaccgataaatatttaaagtagtttctcaaataatctgaagtggccagtccatcttcgtatagtgtaattcgatagccatcggcatttaacgtgaaagtgttacctccgataaattgcccctcagcaacgtatcctatatcgtctaaattgaacttcattcttgttattcctaaaccatttgaaaaagttaagatcattttttcatcgttaaacttaacttgagcatatccaatctctctggtaccttctgaagtcacttctacatacgtatacatatcaatcatcctcctttaaacagagcataatctatgaaacgcgtaccatagcaagccttaagattgctaagttaaaatattggttgtggaacgcgtttcatactttaaaatgagggtatggaccttaatcgaatttaaaataggacttgataataatgactaatattagaaccattgctaaaaaatctggatactcagcatctaccgtttcccgttttatcaatcagagtggttatgtttctgataaagctagtaaggagatcaaacggattattgacgaaatggactacgtacccaatgccattgctcgtgacctgagtaagggccagacgtttacgattggtgtggtagtacctcatatgcgtcatccctttttttctgagttaacccatggaattatggacttagcttttgctgctgaatataatgttctttttttggaatctcagtatgacgaaaagttagaacaaaaatatttagaaaaacttcaccgaaaagcctttgatgcgctaatttttatatctcgcaaattgccactaactgaattaatcaaatatcaaaaatatggccccgtcgtatgctgtgaaaatccacaggacaatcccattgcggctgcctatacgctccgtgaaagtacctatcaacaggcgttcgaatgggttaaacaaggtggctatagcaaaattgctattattttaagtcgtccgtacggaaacagtgccacgagtaaaattatttttcactcttacaaaaaagtttttggaactttcccagactccaatttagtctatacggactgctacaattacaatgatggctaccaatccgctcatttaattgcaagaaatacgccagatttcatttttggtaatagcgacgatattattgctggcatttatcaatactacctagataataatttagaattgccggccttaatgggacaggaaaatcaaatatctggaagtctattaaaaatccccacgattgatcaccatctaaaaatgattggtcaagccgcttgcgaacttgctattacgggcgctatcaaatcggtttccatcgagtcagaatttatcatcagataatgtcatcctaatatcacatgctgtagtaaaattagacgatgaagtcatcatctcattttttgttataatgacttttataaattttattcataggagattaggtagtaaccttgcaaacattttacacaattgcactacttttaacaggtgtaatcttatctaatattattaaacaacttgtgcctcgaattcccgaagcatttattttaattatcgttggagtaatcctatcatttaccccagcatttcataattttgaattaagaccagaattttttatgttagtggttattgcacctatcatgtttatagatggtcaaaaacaatccttcaatcgaattcgccaacgttttcgcgtggtattttttctgtcggtagttttagctggcgccagcgctttagttgttggaatcttaactaataattttgaaaccaaatggacgctaccagtggccattgccctagcagccatcgttactcccaccgatgcggttgctgttaaatcgatgaccagcggaactgccatgcccgaaaatgttaatgaagctttagaactagaatccttatttaacgatgccactggactggtaatccttgatttagctttatctgttttacaaaatggaactttttcagcaattaccggagtcgaacattttatttttgtcgcgcttggtggcgtaatcattggaattattgccggctttttaattgtttctcttcgcgttaatttaaacatgcgcgctaataatccggaaactatcatcattccgattagtctgttgaccccttttctcgtctatcttttagctgaacatttgggaacttctggcattctagccgtcgttgctactggaatggttcataattgggaatctgaacgcctccgtttaacttcaactcgagttcagcttacctcagcaaccgtctggaatactatctcaagtttcctaaatagcgtcgttttcttattccttggagtgactttaccgatggtttggaaagattttatccagatgggaacgatgacgattgctcaattaattggtattagtttactgatttatctatcaatgctagctatccgttactggtggtctgttcatgaaaatccagacaatcctgaccatttcttaggcccacatgacaaatccgtgcatcagctatggtcaaggatatttgcaattagtggtgtgcatgggaccgtgactttggcgatggccttttcacttcctactagaattggaggtcatcccttcccttatcgtgaagaattaattgtgattgccacgctagtaattttaattagtatgttagtcagtgctatcagtcttccgctgatgcttcctgtcaaaacgacggaatattcactcgctgatatcgatcatgttcgtaataagatggtggattatgctactttacaactacgtgataccatcgacgatcacgcggttcgtgaggctttaacggaacagttgcagtcccaaaaaggggcattgaacggccaaattattgattttgatgaatattaggagttaatgtttgaaaccaaagacttcattgtcacttacattcatggaccttcaatttcagctaaatatagtttagaagttgttaatatttatgaaaaaattctaaataattttgtggctcctaactttaatcctcgggagcactttgctaaccgagtacattatatatttaaaaagaactttaaaaaggtatcagctctttgcaaacacgccctctggcacgtcaaaaatgggcaaattaccaaacatcaacgtaccgttgctcgtcaaaaatggttggctgctcaaccttcagatacgctccaacaacgtctggatgttcgggatgctcttttggaactcaacaatgaagtgatcgactctactgataaatacttagacgatgttttgcgtggtcgcttattacgtaaacaaagtaataaccaatatattaacctcgttcgtagatctatcaatcgatactgctcaatggttcgtcatgattataataaacaggcagtctttgtaagtagcgatttatacattcaagcctttcagcaagaatataactttattcaacgtggagtaagccgtggggttattaccccagaaatggcaactgtgctctatgatgagattaatcaagctcaatcactacaattacaacgtactcaacagcttcaaattattacatcttaagcattttaaaaacacctcttgtgcgttacttattgataagtagcacataggaggtgttttagttcgaattaaattaatttaaacaaattttgaacttcattttaagtttgaatgctagcaggtgctattcaaacccatgattaatacccgtatgtttcatatggctataaaatgtaacttggaaatgataatttatcataaaataatcccctattaacttttttctaggtacatttttataaaaatttaatttcaaattcaacgggataatcttatttttatctgcattcagatttaatttatttttaatgctaaccataagtaattaatatataattatggttgtacaaaatcgggtttagctacttttcagtgggaagttgatgttactaattaagttatcggatgttataaaagagaggtgtaagtaatgaataaattttgccaaagctgtggaagaccacttactactacaaatgctggcactaaagccaacggtgactcatcaaattactattgcatttcatgttatcaagatggagctttcactgaccctacccttactattgatgacatcaaggcgaaagggattaaagaaatcaaacaatcaaaaatgaatatattcaaaaaaatatttttgttaatttgttatccatctcgacttcaacgactagatcgttggcgggaatcctaaattaattcagtcattttaaaggttgaccaaaatttgtaagagtattttgcctactttaaatgtgaataaaaatgatatcataagtaaagttaaggtcttatttcaaattacagttccctcacttaggtaagttttgataacagttcgattctgttagagggattcagagaattaatctctaaaaaaaactaggagttggttgatttgcttaaagaatttaaagaatttgtttcacgtggaaacgtccttgatttagctgtcggtgttattattggtggagcttttacttccatcgttaaatcattagttaattatttaattaatcctttaattggtttatttatcggcggaattgatttttcagattgggtacttaaggtagccggagctactttcaagtttggtagttttatcaatgctgtcattaacttcttaatcattgcatttgttgtctttattttggttaaattagtcaacaagtttctccctaagaaagaagaacaagaagacgatgaagctgaagcaattgaaaatagtgaaatttaccttaaagaaattcgcgatgcattagtaaataatcctgaattactttccaacttaaaaaacaaagaagattcaactaaataacctaaaaaacgtttcttgagagttttctcaagaaacgtttttttactaaagttattcagttcttaaagcaattgctgcatcttttttagcagccattctagctggaatatgtccacctaaaatagttaacacagcactaactatgactaagagaatggcatgaactggatttaattgagagactccacttaaaccagtcatcttttccagtacgacattaattgggaaagtacataaccaagctaccacaattccgaaaagtcctgacccaatccctaagatggccgtctctgcatcaaagacacgggtaatatctttcttacgtgctcctagagctttcaatacaccgatttctttagttctttcaattacggacgtgtatgtgataattgcaatcataatcattgatgtaactaacgaaattcctgcaaaagccaccaagacgtacgtaatggcatccatcattccaccagtcagttttgaaatactaccggccatatccgtatatacaatttgatccgcttttttcttgccatcattatatttatcgaggtagtctaagacccggtccttcttcttaaagttacttggataaatttggatagtacttggtgtttcactaccacccaacatcgttagcatctggtttttggtagaagcatccattgtttcaccagtcatgatattctttttgctagctgcttgagcttttacaatatcagaatctttattatcttcgtaaacggatttggttaattgatcactataggcgattccgttggataataagccatcgctattcttagatttcacccgtaagataccgacaacttttagcgttttagtatctttagcattcgccattgatgcatacttatcactaggaacatagttaccagttggcaattttttatagtaagtattattagttaccaatttggccgttttaccgatcaattgattgtaatcaaatttttggttagttttagctgtaattccaaagttctttaaagctgagatgttaatcttattatcgcgatccgcaattaaaacaacatcagtagccttctttggataacttccagataaaacgtggtaattcttctttaagaagctttgatttccatcacgatcaatgggataaactgagccacccacacctgtaacagaagccatcattgaacttgtatctactgtcttagcatcgggatcagcattactaaacttaaccgtttgccatttaccatctttttggctaattaaattcattccggtactgtaagtaaccgcaatatttttagcgtattttttaggcattttcttgacgtaatctaggtacttcgaatctattttatttacgtgttgggctttatccgatttactcaaatcagcttccacatacttatgtttggagaagctactgttttgactgtccgtcattgctgcacttgaatctgaagcaacggccccaattgaaaccggcatagaagccatcgtatcactttgggtttggtcaatttgtttctggaaaccatttgataaggccaaaacaatcgcaatactgataattccaatcgaggaagcaaaaaccgtcaagaatgtccgaccttttttagtcataatattcttaaaagaaagtttcaaagctgtccaataactcatcttagtatgtttaagcttaaagttggtcacttcatcatgcccattataagggttggaatctgtttggattttaccaccggcaaactcaataattcggtcagcatattggcgagccaattctggattatgagtaaccattactaccagacgttctttagatagttctttaatcaattgcatgatttcatctgaagtctctgaatcaagagctccagttggttcatcagcaagcagaatttctggatcattggcaatggctcgggcgatggccactcgttgcatctgaccacccgatagttggttaggtcgcttgttcatatgcttctctaaaccaactcgaattaaagcatctttagcacggcgcttcttttcttctccactcacgcctgataaagtcatccccatctcaacgttatcaataatcgaaagatgaccaataatattgtacgattggaaaataaatcctacagaattattgcggtaagcatcccaatctgaatctttaaagtcgtcggttgattttccttcaataaccaaattaccagaatcatagcgatctaaaccgcctatcatattcagcatagtggtcttaccagaaccagaaggtcctaagattgctacaaattcttgattacggaaagaaacagaaacgtcatcaagggctttggtggttgtttcaccgaccttatagtatttctttagatgttttaactctaacatatacgctacttcctttttcatttggttatgttaattatagacaatagttaacaattgtcaaccattaatcaaagttaaattaatatgctataataacgttatataatatttataggaggtgaactacccaatggataataaaccttaccaatcagaatgggatcagttaccagaaaacgtcaaagtaaccgcgcaattattcggcacacttgctcaaactatttttagctattttaacgatgaaactattaaaatatcgcctttgaattttatgattttaatggatattttaggtaatcctggtacctccatgtctgaattggctaaaagagtcggtatttctaaaccacaattaagtcggagcgttagcaaattagaagatctacacatgatcaaaagggtccacaacacggaaaatcggcgtaacgttaatgtttaccccgacaaagaaggtagtgatttaatggcgcagcaatttcttcgggttgccaatagattggataaaacccttagtgccctttcttcagaagaccgtgctcgcctagttcctttaatgacggaatcacttgagattctatccaaggctggtattgttcaacaataatttgtttacgatttatgaaaaaagagccttacaagtaactacttgtaaggctctctttaacttcaatttaacttaattttttgctcaatttttgttacaaggttgctaacctcaccattactataagtgactaagttcgtaattgtcgtttgatcaattttaggcgagctagtttgcaacacttgtttattaattgcaattaatattttaggatctgacgcaaactttgaaagttcttcaacttcgccagtagcaacatccacgtctacaattcccacctttacgagcgccttttttagtttattcaccaacctcgaatcgagcatcgcttccactatgggtcctgccccatttgacgtctgtaaaataccaaccattcccgtattgataactacaactttttcaaccatgctatcctacctccaattttattagaaaacaaaatcccccaaatcaattgtagttgatttagaggattttgcttcacttattttacttggtagttgttttaagaactaatgattctggtgtaactagtgcattacctttgaacttcatcacccgaactgcatccatgttcgtaacgatgacgatcatcggtgtctgcttacccgcatttttaattgcgtctaagtcaactttagctacaacgtcaccatgtttaaccgtttgtccatcttccaccttaacatcgaatggagcaccatttaattcaacagtgtcgattcccatatgaagaagaatttctaaaccagcatctgtcttgaaaccaattgcatgtttagtagggaatactgatgtaattgttccatcaaccggagcagtaatcgttccatcagtaggattaatagcatatccgtcacctaacatcttttgagcaaacgtatcatcaggaacttcctcaatatccatatattgtccattagcaacactatagaactcttccgtaacatcccgtttaataccatcagcaaccgtttcttctgttgaagctgtttcatcagcagtcttcactgaagaaattggggccttagcattgtttaattttgcaagttcatctgaaacaaattgaacttcagtaccaataataatttgtaaattattcttatcaatcttgttcaatcctgcagcaccactgcgtttaattgcattttcattaatattatctgtatcatccaatttaagacgaagacgtgtcgtacagttgtccacgacttgtaagttgtctgaaccgcctagagcagcatagatctttttagcttgaacagtatacttatcatctgaatcattagttgcaactccttcaacaccatcgtcctcagctaattcttcgcgacctggggtcatcaaatggaatttcttaatcgcaaaatcgaaaccaaaatagtaaattacagccattacgaggccttgaacaattaaccataatggttggttagcgatcgggttcttcaaactaagcacataatcaactaaaccggcactgaatgcaaaaccagctgtccaatgcataaatgccgcaaatgcgagtgaaaggccagtaaagattgcgtgcaatacgtatagaggccatgcaacaaacataaatgagaattcaagtggttctgtaacaccggtgaagaatgaagcaaatgcagcagctaacatcaatgatgccgtagttgctttgttttcaggacgagcatttttgtaaatagcgtaagctccggctggaagtccaaacatcatgattgggaagaatccagcttggtacatacctgtaacaccctttgtaccttgagaagccaagaatttaccaatatcattaatcccagccacgtcaaaccagaatacggaattcaaagcttgatgtaaaccagttgggataaggagacggttgaagaaaccgtacaatccagcaccaacccagcctaagttcaagataaacttagcaaacgcaacgagagcgccgtaaactggtggccaaacaaatagtaacactacactgacaagtagcataacaagggcagccataattggtactaaacgcttaccactaaagaaggaaagagccatcggtaattttgtttcgtggaatcgattgtataatgctgcagcaatcaaaccagcgataataccgataaatacatttccaatttgagcaaacgaagcatcaacggctgtaggtttgatgttcattaatgtagcaaccgattcaggctttaatacattgaccggtagctcaaaggcaactaacccagcgagggcagcagccccagattgatcgacagacatcccgagggctaaaccaacggcaaataatagcggtagttgacctaaaacagcattaccaccggcttgtaagaaatgagcaactacgtcattactgtaagaagcccaccagttaccaataccaaccaacaaagcggcggcaggcaaaacggctacgggaagttgtaaagaacgacccatgcgttgcaaatatgctttcatgaataatacctccaaatagaatattaaataaatgcgataatccaattctatgttagtggaaacgctatttcaagcgtaaattattggtataatccactttataagccttattttataaaaaaacaaaatcggtatattaacagatgaaattgcaaataactgggaaattaaaaggggagacgaccggatgttatcaacatgtttagcggccgtgttgacttatcatccgcacaatttatcagtcacattaggagaacttttaaaatcagatccgacgactcaaaatttagcgacgttagagggtttcgatattactaagattaatcaaatcctagttcaacacaatgcacgccccttatcagttaattaagtgccttaagttgtgtatagtttcggaagttgtaaaataaaaggcaatagtattaggaggattttacatggcaaaaaaacaactaacacgggtagaggttccggaagcgttaacttggaacgtcaccgatatttttacaactgaagcagattttaaaaaggccattcaacaagttgaaaaacaaattgttgaaattcaagccaattctgaacgaatgaccgagagtgctacacagttattagcattaactgaattactttatgagagtgaagaactccttatgaaagtttatggatatgcggctcgggttaatgatggcgatactgctgacccacatgggaacgatttgatgaatcaagcattattaattgttaataagtgggaagcagccgtatcattttatgatcctaaaataacgcaactatcagcaacacaattggatcaatttttagatgagaagccagaattaaaacaatatgaatttaatttacgtcgaattcaagagcaggctgcccatacccttactcctgctgaagaaaaattgttggctcaacttcaaccggcgattgatgatgcttcagacatttcttcgaaattagatgacgctgatttagattttggaatgattaaagatgaaaatggcgaagaagttcaattaactaatgctacagccagtgaatttgctacttcagcagatcaggatatgcgaatgcgtgctagtaaacaagttgctaaggcgtaccgttcaatgcggaatacctttggtgctacccttaaaagccacgttcatgcccaaaatattttagccacaattaggcattttgatagtgcacgtcagatgaatttggctgatcaaaaaatttcagaagccgtttacgatacgttgattaatacgacacatgaacatctggatttgatgcatgattattatgctttccgaaaagcatacttaggattagatcatatgtatcaatttgatcgacatgttcctttggttgcagatgctaagttaagtttggcatttgaggaaggcaaaaaggttacgatggcagccttggctcctttaggcaaagattatcaaaattatttgcaagaggaatttgaacaacgttggattgatgcagctgaaaataaagggaaacgtagtgggggctatgaggacgacgtttatggagtgcatccatatatcttactaaattggaatgatatttatgatagtacttcaacgttagcccatgaatcgggccacgcacttcagagtgtttacacggataaggcccaacctttctggtattcacaatatccaatctttattgctgaaattgcttcaactttaaacgaaagcttattaaaccattatatgttagaaaaatatgctgatgatcctcaaattaaagcatttattttaacacaagatgtggacaactttattggtacggtttatcgccaaactctttttgcggaatttgagcattttatttatacagaagatgccaaaggaacgacccttacccccgatttgatggctgataaatttaacggattgtttaaagaatataatggagatgctgtaacagatttaccttggaaagacgatacttgggcgcaaattcctcatttctattacgattattatgtttaccaatacgctacatctaaagccatcgcaaccgctttagccgatgatattatttctggtaaacctggtgcattggaaaactataagaaattcttatcagctggagcaagtaattatccggtcgaaatagttaagcaggctggggtagatgtaactaaacgtgactatcttgatcaagcatttaaactatttggtgaagaagtcgaagaattaaagcgaattttataatatttaaactaagatattggaattaaagtcataaaaaaactccccgagttaaaatggggagcatctagttttatacattcaatttaggcatgatacttgtaatttatcctacttgtaccatgttttttatttaataaaattgatcttttaaactatttgaagaacttaactatatttaatttagttgggttctttttttatggactgaagaaatttttaactagtattgggaataaattttattttagggtcatatttttaatatgtgtcttcgcgataactctcttgtaataatccatcgaagaaatgttgaatcgagatttgaccgcgttgggctccgacttctcgaattctttgcatttcattataaacgttctggaaatcaaataaactgttggcatattctagcagaacttcattttcgggatattcaatacacataccggctaaattgcaaataccaacacgtaaggcacgccgaattctttgaaaggcactttttttctcatgttcatttaaagaaagactttcttgaaaatcaatctttgagaaaggaatattttgatcgaccataactttagcaatccgtaagatatcatcacaaccattttcagaagcaatccctaaaaagcggaggattgaatggattcgatcggttcgaagacgatgcttagattgtggtcgattgaatggtgtggcaattccagacgttaatttgttaatttcagccattttatcaactacttggcagtaagaacccactagcttcgtaatatttttaaactccagatgattaaaaggataatctaaataagcgtcaattcctacacgataagcttcgtctttataggcctcattatgaggtcccaccacaataaagtgaggtttgatgtggacttgagcgagacgtttgatcaaatttagcccttctggaaaaatttctaagcaattgatgatcattacgtcgactcttagttgtaataaatcgtcataggcactatcaacatcgaaattaactccaaccagtgagttactaaaatccgattcaataatattttgaacgatggaaacacttgattcatcgtctgatagtaaataaaagttcatagtcggatctccttttgaagttttttgaagttatatgatactttatgaattatacaataataagatataaaaatgaaaaaaatgacaatttttttgttatataaaatatttattcaaaaaataagtgattttattcaaaaaatattcatttatgaaaacgatttaaataaaaataatattaatttttaagaaaatcaattgatcactgaagctttgtgaaagcgcttgctagaattaaacacgtaatcaaatatagaggaggacgttaaaatgtcatttaacttacgtaaccgcagttttttaaccttatcagattttagtactcgtgaaatggaatacatgcttaatttagctgaggatttaaagaaagctaaatatgctggctatgaaggtaatcgtttggctggcaagaatatcgctttgatttttgaaaaagattcaactcgaacacgttgtgcttttgaagttggtgctaaagatgaaggtgctcacgtaacttatcttggtccttcaggctcacacattggctacaaagaatcagttaaagatacagctcgtgtcttgggtggtatgtttgatgggattgaatatcgtggattctcacaacgctcagcagaaacgttagctgaatattcaggtgttcctgtatggaatggtttaactgatgaagatcacccaactcaagttttagctgatttcctaacggctaaggaagttttgaagaaagaatataaagatattaaatttgcttttgttggagacggtcaagacaacgtatctaatgctttgatgctaggtgctgcggtaatgggaatggaatatcacgttgtaacccctaaagaacttgaaccaaccaaggacgttttagacaaagctaacgcaattgctgctaaaacaggcggtaaaatcgttgttgaaaatgacgttaaagctggtgttaagaatatggatgttatctataccgatgtatgggtatcaatgggtgaaccagatgaaatgtggcaaaagcgtattaaattattgaagccatatcaagtaactaaagaagtgatggaagctaccgaaaatccaaatgcaatctttgaacactgtctgcctgcattccacaatacagacacatcaattggtaaaaagattgaagaaaaatatggtctatctgaaatggaagttactgatgaagtctttgaaagtagtcaatcagttgtattccaagaagctgaaaatcggatgcacacaattaaagctgtcatggttgcaactttaggtgactaaggagggcgagtttatgtcaaaaatggtggttgccttaggtggcaatgctttaggaaagagccctgaggaacagttacagttagtaaaaaatacggctgcatcattgattggtttggtacgtgatgatcatcaagtagtaattagtcatgggaatggtcctcaagttgggcaaatcaatcttgggatgaactacgccgccgaacatggtaaaacagcagcttttccgttcccagagtgtggggcaatgagtcagggttatatagggtatcatctacaacaaagtttacaaaatgaacttgcaaaacgaaacatggataaaaatgttgtgacaactataactcaaattgaagttgaccaagatgatactgcttttcaaaaaccgactaaaccagtgggtgatttctacagcaaagaacaagccgcacaaattgaagctgaaaaaggatatacatttgtcgaagatgcaggacgtggatatcgccaagttgtagcttctccattaccaaaatcaattattgaaatcaatagtattaaaacgcttgtcgaacacggtgatttggtaatcgctggcggtggtggtggcgttccagtcattaaaactgaaactggcttaaagggagtaccagctgtaattgataaagatcgttcgagcgccttgctagctgataatatcgatgccgataaattgattattctcacagctgttgactatgtttacgttaattataataagccagaacaaaaagtgctcaagcaactaagcgttgaagaagcccaaaagtacatggatgacggacaatttgcagctggaagtatgctaccaaaagtacaggcatgcttatcttttgttaagggacaccctgaacgtgaagcaattattacctcattaaatggtttggatgacgctttgaaaggtaatttaggtacagtaattcacggctaaataatttacttaagtaccaggtagaaaaaaataagaataggagtgtgattatagtggcgaacgcaattcatgtaacttcagaaatcggaaaacttaagacagttatgttacatcgtccgggtaaagaaattgaaaatattaccccggattcgatggaaagattattgtttgatgatattccatatctaccaatcgctcaaaaagaacatgacttttttgctaagaccttgacagatcaagggattgaagtgatttattttgaaaaattggcagctgatgctttaagtgacgatggagtaagaaaagaattcttaaatagaatgattgctgaatctggctatgcagttggagtaatccatgacgctttaatggaatatctttacgcaatggatcctcagatgatgattaatcaaattattgaaggggtacgagcaagcgatgttaatattgttactcctgacttacaatccgtttctgagaatacagattggcctttcttaatggatccaatgcctaacgcatactttactcgcgatccccaagcatcaattggagatgggttatctatcaacaagatgacttttgaagcacgcatgcgtgagtccttaattaccgaatatatcatgaactacaatcctcgctttgctggaaaagtcaaggtatggcgagaccgtaatcatcgtacccatattgaaggtggggatgaattagttttaaatgatcatgtattagcaattggtatctctcaacgtacgacagcgaatgcaattgaagatatcgctcgtaatttattcaaagattctaattatgacacgattattgcaatttcaatacctcataatcatgcaatgatgcatttggatacagtatttacgatgattaattatgaacaatttacagtacatccagcaattttaactggtgatggaaaagttgataactgggtacttcatcctggtaaagatggtgagattacaatggaacatcatacagacattaaggaagtcttgaagaaggctcttaataagtctgaaattgacttaattccaactggtaatggtgatccaattgtggctccaagagaacaatggaatgatggttcaaatacgttatcaatcgctcctggcgttgttgtaacttacgacagaaattacgtatcgaacgacttactacgtcaacacggtattctggtccatgaggttcgttcaagtgaattatctcgcggacgtggcggtccacggtgcatgtcctgcccaattgttcgtgaagacatctaaaaataattttatggcagaagtgaactgtggtactagaaaatagtagacagtttacttttgccatttttattaaatttaagaatggagtgaagaacatggaaaataaaaacggaattgggcgactaggcttaaccgccttaattgttagctcttgtattggaaccggaatctttggaattaccaatgcggttgccgctgctgccgcaccaggaccagcattattgtcttggttgtttgttggaattggttttttgttcttagttttatcattaaataatttatctgaaaaacgccccgatttagaagcaggaatttttagttatgcgggagctggatttggtccattaggtgaattcatttctggatgggcttactggctttcagcttggcttggaaatattgcttttgcaaccatgctgatgagcgcgattggaacttttttaccggccttcaagggtggccaaaacttaccatcaataattgtagcaattattttctgttgggctttaactctactcgtcaatcgtggggtagaaagtgcttcgtttgttaacaccattggaactttctttaagataattccactagttttgtttattatcattgtaattattttctttaaaggtcacatgtttacaactgatttttggggaaacgttaccaataacttttccaaaggaactacaaccggatcaatttttgaacaattgaagggaacattatcaactttaatttgggtattcattggtgttgaaggtgcttcagttatgggccatcgtgctaaaactagaagtcaagctcagcaagccacgattatcggctttgttttacttctgataatttatgtcatgatttcaattatcccttacggaacactaacacgtgcccagttggcgggtgctgaacaaccagctttaggaaatgatttacaattaattgttggtagttggggcgcaatgattattaatataggtttgatcatttctacggttatctcatggttatcgtggacgatgttaccagctgaaactacaatgttaattgctaaagataaggttatgccaaaagtttggggtaaattaaatgaaagaaaagctccaacaacgtcactaatgattacagcggttctacaaactattttcttattctcattgctattcacctccgaagcttataattttgcttattcattagcttcagcagctattctattctcctacctatttgtgggattgtatcaaatgaaatacagctacaaggaaaagcaatggggacagtggacaattggcttaattgcagctttattccagtttgcctgcatggtgctatctggttggcaacaaattttgttagtctctatcagtttcatcccaggattcattatctattatcaagcaacgaaagaaaataaacgtactttaactggtaaagagaaagttatgatggggatgattttgattctcagtttgattgccatttatttggtagttaatggaacaattgttgtgagctaattaagcaggttaaaagtataatttgtctaagaaattaagacgaaatatgattttttgattgtatagggtattggacactaattaagttacgaagaatttagacaaatattctgaagcatcacgtatatcaaataactaattaaaatttttgggagtaatttgaatgacagagaaaaatgggaaaataggcttattaactttgagtgccctagtaattagttcatctattggtagtggtgtttttggaattatgtcagatcttgcgagggctgcagcgccgggaccggttttaattacgtggtttattgttggtttgggtgttatgatgctggctttatcgttaaacaatttattattaaaagaaccagagctagagggaatattttcctatcccaagaaaggatttggccctttcatgggttttattagtggttggggatattggttgtcggcatggttgggtagtgtggcatttgcaaccttcctgatgagcacaataggttatttttttccaattcttaggtcagaacgaaatttaccattaattctaattgcaagtatcttttcatggggactgacatatctagttaaccgcggcatcgaaggtgctgccataattaatacaattgtaaccgtatgcaaattgattcctttatttgtatttattgtatttggaattattctttttaaaggcggaatgtttacgcatgccttttggaataatatgaataataattttgttggtggagatgttataggtcaagttaagaactgcatgatggtaatgatgtgggtttttgttggaattgaaggtgcctcaatactatcggcacgagctgaaaagaaatcggatgcgggaaaagcaaccattttgggtttgattagcttattagttatctacattttggcatcagttttaccatatggatatttaacccaagaacagttggcagcgattaaacaaccagccatgctatatatatttgaaaagatggttggtacttggggtggatacttcattggaattggattaattgtatcaatcctaggtgcgtggctttcctggacgatgttaccagccgagacaatgttattgatggcaaagcaaaaactattaccagaatattttgggaaaattaatgataaaaaagctcccacttttgccttaattttaacggctggattaatacagattttcttatttaccctattttttacaactaaagcatacaattttgcttattctctttgtaccgcagcggtgattgtgtgttatatcctggttgcagcttaccagattaaatattcgtggacacatatccatgaaaaaggaaatcagcaacaattggtaattggtgtcctagccttgttgtttgaagtaataggcattttaatggcagggttaagttatttattgctatgttttattgcatacatccctggaatttatttttatggtcaggctcgtaaaaataatggacacgaatatttcctctctaagggagaactgatagtaacagtatttataacaattggtgctctaattggaatggggttagtgataatgggaaaaattatagtttgaattgtagaaaaataaaggtgcaacgattaaagaaattcaagatatggaagtaatagccagcgagctaaaacattaaccacttcgagtgtgcaatcaaagcttatacaagctttgataacaaagtgtgccggagatttgtatatttctcacatccattaaacaacaaaaaatttgtatagcctcaaagagatcatatttaaaaattatttttaattaagtaaataatttaaagtagtagattgaaaaaatataagttcaaaaattttaatatatggcctgaagcattttaagtatggaaagtttaacttccaaaatggtgtctgacgcttaaggccatattttatatccacataaaatatgaggtgataaaaatgaccagtaaagccaaaagacgttttaaattaaaaatgcccggtgcctttgtaattttatttattttaacaattgtagcagttattgcgacatggacagtcccttctggtagttatgctaagttagcctataatcagactacttcaagtttgcaggttaaagatcctgggggcgaggttcataaggtacctgccactcaaaaggaattaaataagttgggagttaagattgatataaaaaaatttacttcaggagggattacgcaagaaatttcgattcccaatacatatcagcgtttgaagcaacatccagctagtattactaaagtgactacgagtatggtacgtggaacaattgaagctgtagacattatggtattcatctttgtcttaggcgggttgattggggttgttagggctagtggagcatttgaatcaggactggttgctttaaccaagaaaactaaaggtcatgaatttttattaatttttttggtagcaattttgatgatattaggtggaacgttgtgtgggattgaagaagaggccgtagctttttatccaattttagtgccggtattcattgcaatgggatatgattccatagtatgcgtaggagcaatctttttagcaagttcgattggaacagcattttcaacgattaatccgttttcagtcgtaattgcatcgaatgcggcgggaattaattttacagaaggaattggatggcgtgtgtttggatgcatagtggcagctatttttgttgtaggttatttatactggtatagtcgaaaagttaaggacaatcctcagttttcatattcgtatgaagatcgtaacacgttcaatagtaagtggtcggttgaaagtactgatgacagtgaggcaagttttactaaacggaagaaaattattttattgttattcgttgccggatttccactgatggtgtggggggtaatgacacagggatggtggtttccaaccatggcgtcttcgttcttagcatttgcgattattatcatgtttctgactggtacaggagcaaatggtattggtgaaaaaggcgttgtagatgcgtttgttaatggagcatctagtttggtaggagtttctttgattattgggctagcacgtggaattaaccttattttaaatgaggggatgatctctgatacaattctagatttctcttcagctctagtagctaacatgagtggtccaatatttattattgtgatgttattgatttattttgtattgggattcattgttccgtcttcttctggattagcagtcttatcgatgccgattttggcccctttggctgatacagttgaaataccaagatttgtggtagtaacagcataccaatttggtcaatatgcaatgttattcttagcaccaactggattagtaatggcgacgttgcaaatgttagacatgcagtattcacactggttaagatttgtatggcctgtggtggtcttcttgttagtatttggcggaggaatcctagtagcacaagttttaatatattaaaaaataaaaacaccggaatttaaattccggtgttttgctgctttaatattaagcataaagggtaaaaagggtacatgaattataaagtgttaattgttaagggatcaaattgaagcaaattgctcctagaatggcaccaacaactggtcccaaaataggaacccaactataggcccaatctgagccgcctttgttagcgattggaagcatcgcatgtgcgagacgaggacctaaatcccgcgcaggatttatggcgtaaccggtagttccgccaagtgaaagtccgattgctgtaatgagaaccccaacagcgattggattaagaccctgagtgaattgtccccgagtaaaggctaataaaccgaaaataagtactgctgtaccaacaacttcactaataaagttcatgctgtaattgcgaatagcaggttctgtagcaaaggtaccaagaatagcatctttgtctttggtttctttccaatgtgggtaataatgaatccaaacgacaatcccaccaactaaaccacctaaaatttgagcaatgctataaggaataacgcttgaccaaggaaatttaccggcaattgccattccgactgaaactgcaggatttaaatgggcagggctgaggaaagaggatgcataaacccctaatgtaacagctaatccccagcctaaagtaatggcgatccaaccagaaccttcagcttttgactttctaaggctaactccagccacaacaccgtcaccaagtaaaactagtacaaatgttccaataaactcccccagtagttgaagcgataaactattatccatgaaaaggttcctcctattttaggtaagtaaggctagcttcatcgattgtttcttggagtttcttcgcttgagcttcacgctcttcgtcagaccattcgaagtaacgagccatttcattaataacaccctttttaacatcatcaattgtatcgtggtggaaaagaaggtgattggtacggcggagcaagtagtcaacaggtgtcagcgtcatttcttcattcattgaataatgtagactaattgtctcagcaagtgttagcccgggtgctgcttcaattttaccaatctggctaaatacacgagcagcatttgatccaaataggttagctatttgttcagcctcagcttttgatagaccactttcaattccttgtttagcgaagaatgaaagggtagcgtcgacgttattaggatcaatatcaccaccagaaacttggagatgcttagaatcaatttcgttgaatgtttcgttgaagtcttctttgagaactttggtgattagagcaatggctccagcagccattttacgataatcggtaatttttccacctgcaagggtgattagcccatcgtttgcaacgtcgagggcgctaccacgagatacagcagaaggatttttttctgagagggtgctttctagattattaaggacatcttcaacgtcaactcgatcagcttctttattttcatacttatttacaatatcaatgacttcatcaaagctatccgaagtaatttttccggaattaccaccattgtagtctgagctaccattggaagaaattagaggacgtaaacctgcccaactagcttcaatatcatcaatcgtaatcttagcttctggataatgtttattaatgatacttaacaagtaatcgacgtcctcttgctcaactcgtggatgcaagaagtcgcctttgtaatctgtatcggtggttccaaaataggtctttccttcgcgaggaattgcgaaaatcatacgaccatcttgtttgccagagtcaaagtaagttggctgagggacgtttagacgtgagcgatcaacaaccaagtgcacccctttagtagggcgcatctgtggaacaacttcttctttatcatccatttcacgaataaagtccgaccaaggacccgttgtgttgattaccaatttagcgtgaatatcaaattcttcaccagttaagagatctttaacgttaacaccatttacacgaccattttcatcatgcagaatgtgttgagctttgatatgactgaccattaagccaccattttcatgagcttttttgatgttttcaatcactaaacgagcatcattattacgaaaatcaaggtaaacaccaccacccaaaagaccttccggattaagttgaggctcacgttgaagaacctcgtcttttgaaatagtgtagttggtgtatttaggatctgtaacaccagcaagttgatcgtacaaattcattgcaattttaactgaaaacatatcaaaggttgatccaggttcgtcataaattggaagaagcattggatcagggcgaggaatatgaggggcaattccttgaacaaccgcgcgttctttaacggtatcagaaactacctcgacatcgaaatttttaagataacgaattccaccatgaactaacttggttgaacgagaagatgttccttcagcgaaatcttgcatttcaattagggcgttgttcatacccatggcgcttgcttgaatagcaacacctgcgccggtgattccaccaccgatggtaagtaagtcgagcgtttcatttttcaatctttcgatatcttgttttctactaattaatgagaatgacatgaaataagcctcctaagttattttgattgtcgtggtcgatgtttaaattgacgagttgctgcaaccgcttcttgccaacctgtgtataagtcttcacgctcatcagttgacatctttggtttgaataccttccctggcttatattctttctttaaatcttcaaggtctttccagaatccaactgctaatcccgcaagaaatgcggcgcctagagcggtggtttcgagatcactagcacgatcaatttcaattcctaaaatatcagattggaattgcatcaagtaatcattattagaagcgccaccatcgacacgaatggaaggaatatcaattcccgaatcctttttcatagtgtcaataacgtcacgagattggtatgcaagggattgaagggtagctttaatgaaatcttcacgggtagttccacgagtgattccaaaaactgaacctcgagcattaggatcccagtacggagcacccagtccagtaaaagctggtacaacatagacttcattatcattttgagaagaaacagcggctgcctctgattcagaagcctttataaacagtttcattccatcacgaagccattgaattgccgaaccagccacaaaaatactaccttctagtgcgtaatagactttgccattaataccgtaaccaatggtggttaataaattattatcagataattgcggtttttcacctgtgttcattacggtaaatgcaccagtcccgtaggtatttttgaccattccgggttcgaaagctaattggccaaataaggccgcttgctgatcgccagccattccagagatgggaacttcgctaccataaaagtggtaatctttggttttaccgtaaatggtagagttaggtttaacttccggaagcattgaagcagggatattaagtaaagcgagaatttctttatcccattctaatttgtgaatgttatacaacatggtgcggctagcgttggaatagtcagtgacgtgcgcatcaccatccgttaatttccacattagccatgtatcaatggttccaaacaacagctcgccgcgttcggcgcgtgcttgtgcgccatcaacgtggtcaagaatccagcgaattttggttgccgagaagtaagcgtctgtaactagtcccgttttttggtgaatcatgtcgccatacccatcttttacgagttgttcagcaatttctgctgtctgtcgagattgccacactacagcgttataaatgggaagtccggtctttttatcccaaatcacggtagtttctcgttgattggtaataccaattccactaatttggttgggcttaattcctgactcgataaatgcattagcaatggtcgacaatacggcattccatatttcgttggcattatgttctacccatccaggtttcggaaagtactgtggaaattctctttgagcatctgccattttatttccagcatgatcaaagatgattgtacgagtactagtcgtcccttcgtcgatggcaagaatatatttgtctgccatgtccgtacctccgtttttttaatttgttaagattcaagaaagcgctttctaaagatctcgttgttaattataaatcgtttttaataattaaaaaacaaaaacgcttgtgaaatattgtctaatatttatcatttttttaaaaaatgttttattatttgaaagttaatatcattttataatccgaagtgactgttataggggattttgattcggataattgacaaaaaagtgctattaaataaaggaactgattgtaaacttactataaaaagaagcatcaagcagcacgctaggtgctgtttgatgcttctttagtggtttagtttatttttgcaaaatgggcagcgatttttttacgatttccccgatgagtagtaacaatcaaggtatcaccaggtttaattactgaatcaccacttggaataattgaattagagccgcgacgaatgctaattaataaactttctttgggccaagaaatattgcgaactgctaaaccatccagcttagaaccttcgacaattggaatttctactcggtcttgaggcccactaggagtggcagtaatagttggaactaattgatgaagtaaagattcataaattggttcaccgccgagtaaatctaatacaatgtaggcggtaagcgccacaacggctagtggcattaaatgttgtagcgaaccaaccatttcagtaatcagtagaattgcagtaaatggtgctttaccaatggcggcaaagtagccagccatggcataaatcacaaagttgggtaagtaatggatatcaattagattaagattagccatgatactaacgtacaaagccccaaatacagcacccagggttaggattggaagaaaaattcctccgggtaatccagacccataagataccatggaaaaaatgaatcgaataattaatagggtgaaaagcgtcataaaaatcggatttttgttagcaattgcagtaatgatggaatttccaccacctaaatatgatggccataaaattccgatgggaataatcgttataaaaggcactaaactatggagccaacgtggtaaaaagctaattttttgataccatttttttagatttaatgtacaaagctgatatagtcgtccaaaaaggcccaataaaatccccaaggcaattaggtgccagtaaagcccaagaggcaaagaatgaggatatctaatcgctaaaactggagttaaaccaaaaaagttaagagaaacaaagtttgacacaacggcgctggtaagggcactaatccaaaccaacggagaaaagttatggtagatttcttccaaaacgaatagagtactagcaataggagcattaaaagcagctgaaaggccagctgcggctccaccagcgattaaaacgcgacgttgagaaccactatagtggagggtttcactccaaccttgacctactaccgctcctaactgaatagaagggccttcacgccctagcatcaagccagatccgattgctaaaatcccaccagtaaactttttccaaagtactggccaccatttttcttcatattcaccagataattgtccttcaatttgaggaattcctgagccagatatttggggagaagttttaactaacaatcctaccaacactgctaaaataatattaattactacaatcagggccaaccaatgccaactggaactggctagtcgataaattgattgtgaaatttctagaagatgttcgattgctagtctaaatgtgctgacaattaaaccaatcaaagttccaataaaaatagagtttagtaaagtagataatcgagtatcttcaattttcaaatgcatttgtttcacaccttatttaaacgtaattatttctatagtatcatacgaagaagctgaaaatgttcaaatttatttgataaataaaaacggtataatagaaggaaatagatttaggatggtgttttaataatgaaaaaagtagttagctttgcaggatttgatactttatttgatacagaagttttttacagagcaattggtcgattaggtgaacgttataatattgacgataatttagttcgtaacacttacgttgaaaaagaattagctttgatgaaagctgatgagtttgtaaaatactccaagttaatggaagaagccctcaatcaaacggcagatgagttaggatttaaagttgaccctagtgactttagtgatgttttgattgctcataccgtgatgaagcctttccctgatgcaccgactgcgctttatcaaattaaagctaaaggctatgaaacagtattgatgacgaaccattctagagatttaattcaaagtaatgtgattaatctagatcatgaatttgatatgattattacggcagaagatgttcagacatataagcctaatcaaaaattctttgactatgttaatgatcaactcggcaatgatgtagagaaacatgttcatgttgctgtagatgaagttaaagatttgaaacctgcccaagatgctggttggaacgtgattaagattgatcgtaagtctgaggatgcatcgattgcatcattaatggacacagtagataaactataatttgtcgcatattgttagtttgtaaaatcgatttctgttattctaaccatgtttagatgataggaggaaagtacaatgttaaatcaaatcaaaattggtaaaagtgcagttgaaactacaactttaggattagggaccaataaagttggcggacataacttgtttgaagggttggaagatcaagatggttacgaagtagttagaaccgctttggatagcaacattaagttgttagatacagcttatgcatacgggtatggtcgttcagaagaaatcattggtgatgtaattaaagattatgaccgtagtaatataacgattgcaactaaggcagctcaggacgtaaaccttgattataagcctaacaataatccggaatttttaactcaacaaattgatcatgccttgaaacgattaaaaaccgattatattgatattttttatatccactttccagatgaaaccactaacaaagcagaagcaattgaagccttagttaaggcacgggatgcaggtaagatcaaagccattggagtttctaactttagtttagagcaaattaaagaggccaatgctgatgatgttattgacgttgtcgaggatcattacagtcttgtgcatcgtgatgctgaaaaagaattaattccatatttaaatgagcataatattacttttgttccatactttccattagcttctggaattttgactggtaaatatgctaagacagatagcggaaagttcaaccaatattcccaagcggaatttgatcaaatcatcgatgccgttgaaaaggtacgtggaattgctgaaagtaaagatgcaacggtagctcaagtagtgttggcatggtatctaaagaaccccaacctcggcattgtaattccaggagctcgtaaagcagaacaggtaaaaagtaacgttaaagctaccgcaatcgaactaagcgatcaagaataccgtcaaatcgatgcgtggtttaaattttaacaactgaatcaaaagtcattaacaaagatgctagagcaccaaaaagttagaccaaaaatctagctattggaagtcactacagagataggttaatggctttttttatttgtagtttataagcgttttaattgtaagcggttcacaaaaagagttagactgtagacgtaatattaagaaatagggggataatacagatggataaagtgaaagttatcattgttggggcatcacatggagggcacgaatcggcgattgagctattagataaatacgataatgtcgatgttacgatctatgaaatgggagatttcgtatcgtttatgtcgtgtgggatgcaactttatttagaagaccaagttacagacgttaatgacgtaagaaatttccggccagaggatatcacttctaaaggtggaaagatttataacaatcatcaagttacagcaattgatgttgatcaaaaacaggtgacagttaaagacctgaaagcaggttcagaagaacaagtagcttatgataaattaattcttagttcaggagtaacacctaagaatctaccggtaccaggcacagatcttaaaaatgtttatttaatgcgtggttatgactgggcaactaagattaaagctgccttgactgatgatagcattaaaaacgtagccgtaattggttcaggatatattggaattgaagcagctgaagtatttgctaagaaaggtaaacacgtcaccttattcgatttcatcgaccgtcccctcggaaattacctaaaccatgaaatgacggaaattattgataaaacattaactgacaatggtattcaagtagaaatgagccaaagtatcactgcatttaaaggcgatgataaagttgccagtgtagaaactaaaaagggaagttatcctgcagatttggtaattcaagctgcgggtgtccaacctaatacagaatggcttaagggcgttgtggacttgactgatcgaggattcatcaatgtagatggatacttgaggaccaatgtgccagacgtattcgccattggagatgcgatcttaccattatcgattccagccggaaaaccatcgccgattgccctagctacaaccgcccgtcgagaagctcaatatgttgtgaaccatatttttgaaaagaaaccaactcaaatttttaagggagttgttggttcatcagccttacatgtgtttgacgaacattttgcttcgaccggtgtaaatgaatttacggcagagcgttctaatgttgaaattgttaactcacattacgtagatcatattcgccccgcgtatgttcccaaggcggaaggaaatgtgcgcgttgatgttgatatcacgtttgacccccatacccacattgttttaggcggcgcggtactttcgaccgctgacatgacggcacaaggaaatgttttagctttggcagtggaacaccgattgacggtagaagacttggctgaagcagatttcttcttccaaccaggctacgaccgacaatggagtttaattaatttagctgcgcaacatgctttaggatatgcacgtttctaaagtagattcaaaaaaagtttgatacgcgatttttaatcaagtatcaaacttttttatttcattagcgaatttccataaattaaatcggcaatcttttgttgattgggacttagaatccggtctttacgttggaccaaattcatatagaagaaaggttggtcttcatcataaaaaggcaatgctttaatatctgggcgggtagtgagtgctgaattggcgataaatccgaccccaacattttgagcaaccatttcttgaatgacctgagcgtcgttactttgatagacgatattaggtcgaaagtttgtaatcttactaaaattttttaaggcctcagaatgaacgaagttactatcaaaagtaagaaatttttcattctttaattcagaaaaccaaatcttttcacgtttaaagaaaggtgattggttaccaacgatagcggtaaaatggtcttttcccaagtgttggtaggctaaatttcggtgatgttcattttgaaccgatcccattaatgacatatccaaggttccatttaaaagcattttttctaactcagctgatcctttttctacgggaacaatcgcttttaatagattttgttcggtaagctgtttagcgatttttggaaaaaagtatttggtcataatggggggtaatcccaaaatgagtttgttggtattaatattgttgatactattttgcgcaatggcgatatgatccaaaatcgcattaacatgttcatctagttgttgaccgctcaaagtgacatttaagtggtgacgtccttggtcgcgagtgaaaagggtggtattaaactcttcttctaatcggcgaactgacatactaattgtcggttggctaacatgaaaaatttcggcaactgaagaaaaatttttattttttacgagttcatgaaaataattcaaatctttaatgttcatattgcacctccgaaatactattataacagtatttttagaattaatataaaaaatatttataactaataacaaatttgactatagtttttacgaggcattaaacttacacagtaaataagaactggaggaagaaaaatgactgaaaaagcaatgagtattcttaataatccatatttaaataaaggaacggcgttcactaaagaagaacgtgaccaattaggattgaatggtttaattccaccatacattcaaacaatcgatgaacaagttgaacaagtttatgcacaattccaaactaaggccaatgaccttgaaaaacgtttgttcttgatgcaaatctttaacgaaaaccgcgtgttattctacaagttatttagtcaacacgttgttgaatttatgccaatcgtttacgatccaaccatcgcagatacgattgaaaactatagtgaattatatgtacaatcacaaaatgcaacattcctatcaatcgacgatccagatatgatggaagaagctttgaaaaattcagctgctggacgcgacattcgtttgattgttgttactgatgcagaaggtatcttaggtattggtgactggggtactaacggtgttgatatctctgttggtaaattgatggtttatacagctgccgctggtatcgacccaagccaagtattgcctgttgttctagatgttggtactaacaaccaagatttattgaagaatccaatgtatttaggtaaccgtcacgaacggattaaaggtgatcgttactacgattttgttgataagtttgttgaaacagctgaaaacttattccctaacatgtacttgcatttcgaagactttggtcgtgataatgcagctaacattttgaataagtacaaagatcgttatgtaatcttcaatgatgatattcaaggaacaggaattatcacattagctggtatccttggagcattaaacatttctaagcaaaagattacagaccaagtttacttaagctttggtgcaggtacagccggagccggtattttaggacgaatctacgaagaaatgattgaaaatggtttatcagaagaagaagctaagaagcacttctacatggtagacaagcaaggactattgttcgatgacgatgaaacattgacaccagaacaaaaaccatttgctcgcaaacgaagtgaatttgataatgctgatgaactaactgatctattatcagttgttaaagcagttcacccaacaattatggtgggtacttctactcaaccaggttcatttacagaagaagttgtacgtgaaatggcagctcatacagaacgtccaattatcttcccactatcaaatcctactaagttagctgaagctaaagctgaagatttacttaagtggactgatggccgcgcattaattgctactggtattccagtgggagatattgaatacaacggtgtaacttaccaaattggtcaagctaataatgctttagtttaccctggtttaggtttaggtgtgattgcttcgactgctaaggtattgaatgacacaatgatttctaaagctgctcattcattaggtggtatcgtggatgttgaccaaccaggagctgctgtattacctcctgtttcaaaattgagcgatttctctaatactgttgctaaggcaattgctcaaagtgctgttgatcaaggacttacaaaagaaaagattgataatgttgatcaagcagttgaagatacacgttggaatcctgaatactaaaatcaggacaatcggagaaagcaaaagagagaattaaaataagagaagcaaaactgtggagaggacgttggtaaattcgagcgtttcagttttgtgaaaagaagagagtgtgagaaaatgactgcgtttattacgtctgttggaagtattgttacgattcttttaatgatgggcctcggttttgggttgcgaggaatgggttggtttgacgaccaatttagtggtagtatttcaaaattaattatgaatgtggctttaccagcttcaattttcatgtcagtaatgaaatatctaacattacctaagttgattggtctttcaagtggattgatttattcatttggaggagtaattattggttacatcattgcttggattacggttaaattattaaaggtacgtccaggccgtcgtggactatttatgaacacggtagttaatgctaataccatctttatcggattacctttgaatattgctttatttggtacaaagagtttagcctacttcttggtttattatgtaacaaatacagtttcaacatgggccttcggggtcttcttgattgctaatgatgatccaactaagaaagctgacgacaagtctactggccgtaagataaactggaagaaacttcttcctcctccattacttggcttcctagtagctatcgtttggctagtacttggcttgcctgttccaggttgggctggtaacacattgagttacgtaggtaacttggttacaccattatcgttaatctatatcggtatcgtattatacgatgcaggtttgaagagtattcattttgatcgtgatacaatctttgctttgattggtcgttttgttctttcaccacttgtaattacagggttgatcttattaggagcacatacaggtcacagcttaccaacgatggaaatgcaaactttaatcgttcaagcagctgcacctggattagctgttatgccaatcttagctaatgaagcacatggtgatgttaagtacgctaccaacttggttacaactagtacgattttattcattgtcgttgtacgaatcgtaatgacattgatccaatttatctaaaaatataatttaaaagtcacatcacaattataaaaaacatcagcagccacttggagtggttgctgatgttttttgtttactaaaaatttaatgagttctattgattaaataatataatttatgaatttaaaatatcattttacatcatgacggatagtctggtattgttaatatcgttgcgtgtataaaaatatattaaaggtttagtggggagaaaatatatggttgctctaaataaaaaaattaagacgcactggtatcttataattatattagtcataggtatattcataacgatccctcagatacaccatcatattacgattattggtgcagatggattatttcattttaaccggatatatgatactgctatgcagataaaaaatcataatttttcctactttattcaattatatgggttctctaactcaggtcgaatggtcacatcagtatatagtccgttaatcacatatatttttggtggaatattgcttatttgcgggagtttttataaatttgaaattgtaacgcgttttttattttttattttatcaggtttatctatgaattatgcccttaaaatgggaaaggtaaaaaatcaattcatgatccaattggtttgtattatgtacgcatttagtccagctgtaattagatgggatgcggcacagaactttaccagtattggtgcgatgcttattcctttggtagtcgggtgcggcatgcggatggttaataataaagatgagcctatcaattgggttcaactaggtactattatggcagtagtggtacaaacacacctagcaactgctattcaatcagtatttttgttaattatctatgctattattgccctaataattaatagagcttctagaaaaaacttacttaaaaatggtatttacgcagttttgctttgtataagcttatcattaaatgtagtagcgggaatgttcgaattatataatggtaactatatagtgcctattgttaagtttgattttgtcgatggcaagggtatttataatattttacaaatattttctggaaaatgggttaacttgttttttattttagccgtttcttcaactttattgttcttccttaaaaagatatctctagctatgaagattacggggtttttatcattaacattatttttgtgttcaacaactattattattgattggcctactatcatgcatgatagtgctgtttttagtagtttactacaatttccagcacgtttagtaggcccagccacagtgttagcattaattacagttgccagcattggtgattttgagtgtacaaatttctttatcaaacaaattaggaatggactaaccctagtgttgttacttttcttagtagtaaatatgcgctctaattttcgctataatcggagtgcaagccacaatgtattagtttcaaaatcgactactataccatatattggacgtgatcctaaaactttaaaacatattacttatttgatgaagcagcctttaaatgaacaagatattaattatattactaagtcgacttcggattatatgcccgctaatcatagcatagataattctgtatactgggattataacaataaaattatccaaccgaccaaaaataaaaattataaaaaggaagtagcgcaacataagattattgtgacatggaagagcaatggaacttatgataatccaccagttgcatattataaaaataatcattttaaattaaacggcttaccagtaatccctagatcttcgggaggtataattaaggttcctaaggttaaaggaaagattggtaaaaatgttatggaagtaacgtatacgcctaaaaaagttagtgtaatgatgctgtggatagctatgttaagctggatttcaatagtattttatgcttttatacgtctattcagacaggtaaaacgttcatttttatttagtaattaaaaaggcgttgtaacaagtattttctatacaaaataggacaaaataggaaaatattccttaatattaagacaaaaaaataagctgttatcaaagattttatttcctttggtagcagcttatttttaacctcgcgatgggatctcaagtgttgctttttcaattgttcgttctttggtttggcgcattaaatcattaagataaaatcctggttttaaaccagtcttttcttttaaggcatagaccgtcagagtatagtcgtgatcagcaggaggtttaggacctaggtaacgggcctcgattgctgggtcatgaaaatcaatatatttagaaacagaactatttttaccttgcacgatacctgtatttaaaatactaatattttcagggatataattagttgcatcaatatcagtagcaatccaatgaatccaagggaaaccagccacaggaacagcatcatagtcgattaaagttaatgctaatgctttagttccaatcggaatatcactaatattgatagggaatgagcgagttggaaaatcatgggatgtatatgctttgggagcatgcttaccaaattgatctggtaagtagccattaattaagtcaacgctaattttcattaaaaacaccgtccttttttatttaattatagcgttttagagcgtttgaaggaatcgtttttaggaaagcaagctgatgtattgcgtactatcagtaataaaatatgcgataatagaataggaatattagtaaattaatttttacactggaggaagtcattttgaagcttatttcatggaatgtaaatggattgcgtgcagcggttaagcatggatttctggatgtttttaaggaactagatgcagatatattttgtatccaggaaacaaagttgcaagaggggcaagttgaattagaattgcctcactactatcaatattggaattatgcggagaaaaaaggatattctggaacggcaatttttactaaaaaaaagcctcttactgtaagatatggacttggaattgaggaacatgatcaagaaggccgtgtaattactttagaatttgaaaaattttacgtaattacttgttatacaccaaattcacagccaaaattaaagagactagaatatcgaatggcttgggacgatgcatttagagcatacatagaccagttaaatcagcataaacccgttattttctgtggagatttaaacgtggcgcaccaagagattgatttaaagaatgataaaactaatcataaaaatgcaggatttacggatgaggaacgcaataaatttacacagttattaaatagtggttttacagatacataccgatacttctacccctcaaaagaaggagtttattcttggtggagctatcgatttaatgcacgtgctaataatgctggatggcggattgactactttgttagttcaaaggcgttggatcaaaaattgactgacgcccagattcatactgaaatttttggttccgatcattgtccagtcgaattagatcttgatatataagtcatgggagagaaaagatgagtttaccaaaaaaattggaagagatgcaggttgaagaagctagtaaattagcgcaaaaccttagagagactttggatcgttggagcaaattatattacaccaaagatgctcctgaagttgaagattacgaatatgacgaaaaatatgcggatttagtggcgttagaagaagcttttccagaaatcatcacccaagattcgatcactcaacgagttggtggtgaaattttagagggctttaccaaagttacccatacagaaccgatgttgtcgatgggggatgttttttcgcgcgatgaattagttgaatttgataatcgtatccaaaaaaatgttgggcatccagttgattataatgttgaattaaaaattgatggattggcaatttcattaatttatcaagatggtgagctgattcagggctctacccgtggagatggaaatattggtgaagatattactaagaacttaaaaactattaagtcagttcctaaaaaattaactcgtccgctttcgattgaagttcgaggagaatgctttatgcctaaagcttcgtttgctaaattgaatgcacaacaattagaggatggaaaaccagtttttgctaatccacgtaatgcggcagcaggaagcttacgacagttaaatacaaatgtaactaagaagcgggatttagacacatttatttatacagttgtggattcaaatcaattaggggccaaaactcaacatcaggcaattcaaatgatggctgaattaggctttaacactaaccctacccaagaagtatgtgctaatttagatgaagtttgggattatattgctaaatacgaaggtcaacgggaaaatttaccttatggaatcgacgggatcgttttgaaagttaatgatttaagccttcagcaagaattgggacacacagttaaaattccgagatgggaaatcgcctacaaatttccaccagaagaggcagctacagtagttcgaaatattgaatggacggtaggacgaacaggcgtggtaacccccacagcggtgatggaccccgttcaattggctggaacaacagttagccgggccactttgaataatgtagaccaattaacagctaaggatgttcatattggcgatacggtactgttacataaagctggtgatatcattccagaaattacacgagtagtgttagaaaagcgtccagcaggaattagtgagttagatattccaacccaatgcccatcatgtggtaaggaattagttcacttaaatggtgaagtagcccttcgttgtattaaccctgattgtccagctcaaattgtagctcgtttagagcattttggatcacgaaatgcgatgaatattatggggcttggaccaaaacaaattcaacaattatacgcgaagaattttattcatcactttgacgatttatacaaattaacttcagaggaattaagccaattagatggttttaaagagaaacgtgttaacaacttacttgaagccattgataatagccgaagaaattctttagagcgtttaattaatgggctagggattcaaggggttggtacgaaaatggcgcgtactttagcggaaaaattcggaacgatggataatttgatgcaaacaacaattgaagaatttgatgctgtagatacgattggagaaaccttagctaataatttagcaacattcttccaaagtgatgtagcccaaaatatgattgatgaattgaaggctgtcggagttaatatggaatatttgggtgtaaagccagctgaaagtcctgatggttattacaaagggaaaaaagttgttttgactggaaaattagaacagtatacacgaaatgaattaaaggagcgtttaattagtttaggtgcagatgtggcgggttcagtttcgaagaaaactgatatcctcattgcaggagccgatgctggtagtaaattaactaaggcacaagctttaggaatcgaaattttagatgaaaccgaagctattgctaaatttgaacaataaaaaaatgggatttaatcccatttttgtttgtttttgaatacgaccattttactaaacgcatagtttgaaatgacaacaacgacattatcaataattttcacgataatatcgtttccgtttagaagcgtaattccaatatataaaataataatatcaattgctaaagtggctgttcgcattaagaagaatcgaactgcttcggttacaagttgaccagtagtttcagtatgagaattaaaaacccaaagtttattactaacataagccacaagcacggaaacaaaccaagcaattacattactaacttggtagaacagatgtaagtaatctgatagaatggcaaagacaccaatatttacgatggtggttaccacgccccaaaagagatatgatataacagacttgtacttgtaaaatagttgattaagcatgatgtcatctccgaatcattgtaaggttaacttattaagtaaaacatgaaagtacaaaaaaagaaagtttatttaatagtttggataggtgaagtagtttgaaaaagttatcaataattgttccagcatataatgaagaggagacagtcgggttattttatgacgctttctctaaagtagaatcacaaatggatgtagaaccagaaattatttttgtagatgatggttctaaagataagactttaatcgaattaaaaaaattacaaaaagagcatgaagaagttcactatattagtttttcaagaaattttggaaaagaagcggccttgtatgctggtctccaaaaagcgacaggagattttgtagcagtgatggatgttgatttacaagatcctccggaactacttcctaaaatgcttaaaattgtcgaagaaggcgaatatgatgccgttgccacccgaagacaagatcgagatggcgaaagcaagattcgttcattcttcgcgcgcatgttttataagtggattaataaggtaagttctttagaattagttgatggtgctcgggatttccgcgtaatgactcgtcaaatggttgatagtgtattatctatggacgaacgtgaacgtttcagtaagggactttttaactgggtggggttcaatacctattacatttcctacgaaaatcgtgaacgagtagccggtagtacatcttggtcattctgggggttacttaaatatgcgattgaagggtttatttcattttcaacagctccattgtcgtttgttacttctgcaggggtactaacgtgcgtgttagctgttttgggagctatagcagtggtgattagggcaatcttattcccacatacagcggcctttggatggccttctctagcagtgattatattgttctttagtggggttcaattgttgagccttggtattatcggacgctatattgccgaaatctatttagaaacaaaaaatcgtccaatttacattattaaggaggagaagtaatggccagccgaagacccttactactgacgctgactatttttgtgattaccgcgataattgtaacattaccggccttcagcggaaattttctaaagctgacaatggatggaggtatccatctttcgagattggaatcagttttcggggcattttctgttggtaagttgccacctctggtgaattttataggtctaggtgatcatgttaatgcatttaatggaatgtatccttggttttccacagcactattttttacattgcctagattaatattgggaagtccaatgcaatcaatgtttgcaggatatgtactgttgaacttagtaacaatgttgaatgcttatttgctggtaaaagaattaagttcggataatatagtacaaatcttttcggcaatattttatggagtaaatgcatatcatttaacattgttattttctagagaagctctaggtgaggcggttgcttatacttttgcaccattggttatgttaggatgtttgcgaatttggagtggaaaaaataagggaccggtttatctcgctataggtatggggatgattgctaattcccatgtgattagtttgttcctaatttgtctactattaatagtaatagaatttacaaggatttttttcaaaaaagtaaatttaatcgaaataaaaagatttctaataagcggattaatagctgcattaataagttgctactcactacttaatattgtaaaaatagccagtactaataagatgtttactcctactaaaggattagcacctgtaatcccatctaagatggtatctacagtattagataatagcatacaagatgataggtatatatttaatataggattggttggattaatattaattatattcttatgtgtagaactatttaaaaaagataaaataggtaattgggtgccatggaccgtttttgcagtaatattatttatttgtacgacatcttggttacaattagagaatacaagattaaaagactctgtttttggaaatatacaatttctaggtaggatttcagctttaattgtattattaataactatagcaattacgatttatttagaagaacaaaaagtacacgaaaaatatattctactaattataagttttttattaattttaatgggtgtcgatagtattttacaatttcatttaaagaaaaatgacgatccaataaggttttatgtaaaaagtgatgaaaattttgtcagaattgcgcatgagcaaacacatggtttaagagattatactttggtggacaaaaacaacaataatattctttatatagaagctaatactggtataaaaaattatagtggtacatctaattcagcaacatttgaagttaaagctaaggaaaaaataactactgtaccgattaatatgtataaaaatgtagattatcacttatatgttgacggaaaaaagaagaagtttcagtcagacaaaaaaatattgactatcaatttgaaaaaaggtaatcataaaattaagttagtatcaaaggcaaggtatagtgaatatattagtatgtttgtatcctgcgttagcctaataggctgtggattatttataatattgatagagccacgaaaacattgaaagtgttttgtagataaaaaaccataacgattagatatataaatctaatcgttatggttttttatcttataacttagttgcactaactagctaatacgtttttggcgttaaaccaaaaactttcatgatcaataataccattaatccaaactccgcctgtatacaagtttgaagaacggaaatctctaggtgtaagagtggctatttgttttatgaatactggttcttctcgttcagagagatcaatattcttaataaatttagttcctttcactccaggaattcctgaccatagaatcgtggtatctttaatttgtatttgatcgccaacaactagactatcactattagttaattgctgaagttcataaggaggtttattttcgagaaccgtttctagtaatcgttctgttgaatggccatcttcccatgaagcaaatttttctaagaaagctcgatactgatcgttgtcaatgaatttagtaggctcggttaaagcctgttgaaccaatggaattaactcttcattagtttcaacgactggaccaggaaccgttgaattgtaatccatataaaaaccacgaatatcttcagcatatgcttttaaatcgtatgcaaagaagatcataggacgtctaagaatcgaataatcaaaaaatacactggaataatcggtaatcaaaacatcacttattaaatataggtcggtaatatcttcataatcactaacattaataactcgattaccatatttggttaaatcaaggttattagcaattagataatgcgttctaactaaaattaaggtgttttcaggtagatctgcaattaatttatctaaatcaaggtgcaattcagcgcgatagtgatctgctcgtacaaagtcattgtcacgccaagttggtgcatagaggacaaccttttgattatgagcaatatttaagccatcttttaatagattgatatcatctttagttgcattacttaaacgatcattacgaggatatccagttgggagtagctgtggatattgctttctaaaggcgcgttgcatgatttcgtatgaatatgggtttggcgttaataggtaatcccaacgcgctgaatcccgtattacttgtttatggtatttcatccgagttactccaggcatagtgacctgctgaacgtcagttccaattgtttttaagggtgtcccatgccaggtttgaactactactgtatctttaggtttaaaccatctaaaaggacgacgaacattagtaaaccaatatttagcgcgtgcttgaatccaaatacttcttaggctaaaccttattacataggggatgttatgctttttaaagtattcctcgtagtctttattgacattccaataaagtttaatttctggataattttgtttcatgtattcataaatagcttttggattgtcagaatattgacgtccaaagaagctttcaaacattgcaatatttgcctttggtagaagttgtccaagaatatttaataatttgtgttgtatgttatttagttttaacaaacgttggatttttgagcgtattagattattttctactgatgattggttttcaggttttaagctaagcatagcttcacttaaacgttgagctgcatctccatcgcgcccatattcacaaaatttatcataaaattgttgaagtttatcagaatattttacttttacatcatcaatgtgtttgagcgaattaactacatcagcggtagttagtgcaaccggtccgggaaccgtagcatcataatccatataaataccacggttagaaggatccaagtaccaatctttatcatatgcgaagaaaatcattggttttcttaagtaaccgaaatcaaacattacacttgaatagtcagtaatcaaaacatcactaatcagatataaatcattaatattgttatagtcactgacatcataaacaaatccagaattattcaagaaattttgtgaatgagatacaaagtaatgaagacgtacaagcaggacgtattcatcactgagttctttttgcatcatatctaaatccaactcaaaattaaaagcatcttttgttgtcctatacgtaggagcatacaaaataacttttttgttgtccggtaaatttagtttctttttaatagaggctaaatagtcagtattattattggtaatcaactcatctgtgcgaggaaagcccgttttcagtattttcttttcaggataatcgaatgcggcagatccatgtttcagcatgaagtcagaaggcacggacattaaatcccaacgaccgattcgcttagcgaaatttttctgaacacgattcgatgcatttttaaaatgaggttcgtcaaagcccattaccttcataaatgttccatgcagagtttcaacctcaatttgaccagctcgcttagaatactgatttggaaagttagtattttgaacaagatacttagctctggccatataataccagtatttaaaggacatctgacgaactcgaattgctggtccctcaactggagtttgttcattttttaggatccaaacgaatttcatattaggacgttgtttggataaatatttatacatagctcttggactgtcgttatatgattgaccccaaagactttcaaataaaacagtgtctttttttaagggtaataatcgcattaaaggatacagaacggaataagttaaccctctacgaatttttgtccgatcaatccaacttttggtctgattaatattaagcttcaaaaaaccgaatttgtctaaaagaacggtagaattagttcttttattaatcgaatgattttgaacaggtatttgtacaggattaatattagctaatttaaatctgtaagaaatatttttagaatctaaaagatttagataaatatgatattttccagaaagaacgtttaattgtgttgggtttcccaagggaattgtgccaacgattttattgcctaaaacagtagctgtaccaccatttagatagcgattgattaggtcagatgatagtagttcgatttttcccgtagcgttcaatttttcagtagatattgaggggattacctcaaattgaagggaaacagcattagaattcttagtaaattgtacattattagctggagctatcgaaacatcaggtctaatccataatcccttagctggattaattgaaagtgcaacacttaaagtagagttgtttagtaattgttcagtaattttaaaactaggcaaaatcgttagtccagtctgagtgtttataaaattaactttacaactctgattaaagtaattttttaaaaaagttgattcaatttctaacttgaaattaccgttattatcaaaagaacaaggtaatagagtatcttgaattttagcagttaaatttaattctgaggaagatccgctgataattagactaccagaattggctaatttaacatctgttactgttgttggaagtttagtacttccaattgctaaatcggaagtcggaactgccttaatagtggtttcccaattggtattatgtccgtagataaacgaaatatcacctgttgggtcagtaaaagttgaaactgatccagaaccctttttaggctgtcctaaatagactgaaagtaacttagagcttttactttttttataatcaatcttaattttgtaagttccaagcccaagcttttcaacgtatttaactgggttcactgaaaaactaaatttacttgcaggaggcgtcatgcgttttaaatggaaattaaaaatggtaaaaggacgcgtaaatgtattgattttaacttttttacccgtagcaatattttccagatatacattgacgatttcttgcttaaaaggaaaatgatgaggagatttttttcctatttgtaaacttccagcaaaattaagctgttcgttcaaatattttacctttgttatccgaacctttaatgatgcaggtgtatgaaaaataggaatgtttcgattctttctatcaagatttgccactttaccattcaatggatggccaaaagataattgttttaaaaggttaaaattaccggtttttaatgcaaagtattgatactgctttttagcagacaacagtttgatgagtggtgtatctaacaaatcccactctctaaaaaatttgatagtggcctcttgaaacgcataaataaaagtatcatctgcatcggcaatatcgtccatgaataatggaatatctacgtctaatagtttgaataacaattggcgcttactagaaccgtgccaaagcgaatattgttctaagatgttttttacttgatataaactttttaagcggtcgaggtatctaggtaattcattttttacttgagtaaaagatgaattaccaccatcacgccatctccatctgtatacaacattggtgaggatatctataccggaactcgctaaaaatgcctttgaagtgaaggaaacatcttcataaatttgattaatgggaaatttaatattttctctcttgagaacttctaatttatacaacttgttccaactggtagtgtcatataaaagttctggatgttcttttagacttgtgtgtttgtaatcatcaataattgcttttttgtgaagataggaaggcttatcacgactcttatcaaaccggcgcacaaaacctgtcacaatttcggagcctgaattcatagctgaaagcatcatcgtagaatatgcattggatgggacgatatcgtctccatctacaaaggcaatccaatttccagaagctaaatcaatgcccttgtttctagaggcactaggacctgcgttttcaagattatgaacagcaataaaattaggatgattttgagcatactcatcgataattgaaggagtagtatcgtcagagcaatcatcaatcattattacttcgattttttgaaatgtctgttctgctagagaatctaggcattctcttaaatattcagatacattatagcaagcgacaattacacttattaagttatcttgccggtttgctttttctacgtttttcaaaatgttcacctttacctaagttgtttaatatttatgtgtctaataatgtattataatatacgttattggtttttacataattttagaaaataagatttttaaaagtttagtaatactgtttaattacttttgaaattatagtaaagttttaaattagttatatttattaaaggagcaatacaaacgatgaatacaatgttcaaaataattagtgaccaattcactaattttaagataattcgacggatggctaagtatgatgaccgtgctaattatcaaagtcattatctaggtttagcttgggaatttttgaatccgctgattcaaattggaatttactatctcgtcttcggggtggctttgaagcgtggagatccaatgccaggagtaccatatttgccatggatggtgatgggaattgctccttggttgtatatgaataagacaactttagatgcttctaaaagcatttatcaacaagttgggctagtttctaaaatgaaatttccaattaacgttttgccatctattaaaattatgggaaatttatatagtttctggacgatgatggcttttggtgtgtttttgatgtttgttaatcgaatttggccaaccatttcatgggtccaattcatatattattttatttgtatgattgcacttatgtatgcgttgggaatttttaattcaacagtgagtgtactagtgcgtgattggcaaattgccctacaatcagtgttaagaatgctgttttatatgagtggagtattgtttaacttcgttacttcaaattttccacctgtattagtacgtcttttagaattgaatcctttttattacgttattaacggaatccgggagtcgttgctttctaagggctgggtatggcaacaaccaaatctcaacttaacgatttcgttctggttgtttatttttattgtgatgatatttggtagttatctacataataaattccgtgctaattttgtggatttgatttaagccgaggagtctaaaatggataatacttataaaattaaattagaaaatgtaacaaaagagtatgacctttttaaatcaaaaagtgataaactaaagaacttttttaatattgggaaagtagatgttccacatttctggtctttaaaaggtgttagtctaacaattaaaaaaggggaaacttttggaataattggagtgaatggttcaggaaaatcaaccatttcaaatattatttccggaatcattcctcaaaccacaggaatggtcgatgttaaaggtgatacttcaattattgctattggcgctggtttaaagagaaacttaactggtgccgaaaacatccgtctaaagggtctgatgcaaggtttgacaatcaaagaaattgatgaagttagagattccatcatcgattttgccgatatcggtacttttattgatcaaccagtcaaggactattctagtgggatgcgttcccgtttaggatttgcaattgcggtacacattaaccctgatatcatgattattgatgaggcattgtctgttggtgatgatactttctatcaaaagtgtgtggacaagattatggaattcaaggaacaaggaaagactattttgtttgttagtcattcccttaatcaagtaaaaatgatttgtgatagagttgcatggatgcattttggagaactacgagaaattggcgagacagaggaagtaattgaacactaccgtaaattctcaagtgacttcaaaaagaagacggccaaagaacgtaaaaaataccaacaagataagaaaaaagagcaaattaaatttaacatagatgagtatcgtaagtctctaattgaagatgaagtcaagaagggcatcgataaaaatcaagcagaaaaggatgtacaggaaagaatgtatcatcaaataactccagacaagatgtctttgacaaccaggattgttactggaatagcaatattaggacttgcattctttgcgttggtaaacatttctggccactcagttactaattcgctggaacatccaacaacgttaatgcatccagtacaacataaagttaggtaattttcatatcataaatttggaagggtttaaaaaatgaaatttaaagaaagaactatgaagaatcctaacgttgggacttttttagttattttaattactggattattactaacgatgcctcaaattttgaataaaagtattatattaggggcagatgctatttttcactttaataggttgtacgatatcgcaatgcaatttgatagtggtaattttagttattttacatctaattatggttttcaacaaaccgctagaattgtgaatgcggtatatggtccaggactggcatatatattaggttttattttattcatttgtaggagttggttaaaatttcaagtaatatcatcattattattatttctgatcagcggctatacaatgaactatttatctactagtgttggactatctagaaaagtagccaatatgaattctatgcttttcatgagtagtttttgggtaatgggttggacagttagccagatgtttatgccgtgggggattgctgtagctccactaatcgtcgctgtgggtattaaatttattaagagtgataaatttacgattgttgaattatctatctccgtttcattgatgattcagatacatatgttaagtgcagttatatcggtctttatattgtttctattctttataattggaattataaatgtgaaagataaacttacactatgtgtaaaagtgattgcggctgctggactaactttattgcttacatttaatgtgtggggatcaatccttgaaatatatattgggaataaattgtatcctccttttgctgcaaatttagcaatgaaaactatgaatttatcggtaggcaatgctgattttaaccatattggaattattgtaagtgtattatttgcttttgaaatagcgattactattatgaactggtcgatcttatctctaactactaaagctgtaactggtatagggacagtgatgttagtactttcatctaatattatgccttggatggttataggtagaaagatacctatgttaaatagttttttacaatttcctagtcgacttgaaggtttcgcatttgtattgttgctggtaggtttaggtttatgtattgaggaggttaatgaaccttcttttaaaaagtatactaagctttttttaatgatagcaacacttttttccgtagtacaatcttactataacgtacagtcaaaaagtgaaggctggaatggtcatcagccgatagcaaataggactaatgtaatagttaaaaataatgcttcagaaagtgaaataagaaatgcttttaggagtaacgacttaagtaaaggtattgagctggccgaaaaaccgacgacggactatgtaccaattaatgttaataatactgataatggcaaatcacagagtgcctatgaaacatatgcagcattgtttattaactcaaaacaaggtgtaaaaaaggaagttaaaaatggaaaattaatagtctcgtggtatgcaaatcataaaggagaaagtaaaaaaataccaattaccgtttataaaaatacgatattgctaatgaatggttcaaaattattaaaagggaatatcacattaggcacgatgaatatgccaactataaaagcaacccaatctgggaaaaatgtattaacagttagctataaatcaagctttattaatggatggaccatgattttaactggtctactatggtttagcataacggcatttaaattagtaatgggtagaaaaagataatttaaaaatactctaagatttaggacgcaatttaaattttagagtatttttagtatctatctgtaaggggagcaaaccaatgaaaaaatggatttatacctttattggtattttaatgtttatatgtatagcatgttatatcgttactttaaaaaagggagatacagttgtttctaatactaaaacaaaaacagccataacaagaattgtagatagaaaagagtctggaaaattaaaaaaaagtctctcgaagactaagtttagcggtacagcggtcttaattaagaacaacaaaatagtagatagttacgtatcaggatctgccactgatgttgataaaaatatgttaacgactacttatgaaatagactctctacaaaaagttttaacagcaggtttagtaatgaatcaagtcaataaaggaaagctaaaattaactgatagggtcaataagtttattccggatctaccaggttctaaatatataacaattcgagaactacttgatatgaattcgggattatcaatgaaaaaaatgaaattttcggggaataatttatctagtgccgaattgctagatgttgtaattgataatgttaggtttgatgctaatacaaaaaaaagcgggaagtggagttaccaaccagtcaattttgtgattttatcagaaattcttgaagaaattacgggaaagagctataaacagctgtttgatgaaacttacgtaaaaaaattaaagcttaagcaaaccgaatttgcttacgacgataatatagaaactaatcgagcttatggatatgtagttaaagaaaatggggatagaattgaacaaaagcccaatggtgcgaccatcttttcagagctaggaactggtcaagtatatatgtctgcaccagattattataaattagtagctagtctattaaatgggaaaattttaggaacagacgcagctaaagaactttatttaccactaggtaatggtaaatatcgcgctggtctatatacatctaagaaaccattttatagatatgctaatggttatggatatggctttgaaagtcatgttcgtattagccaagatggaaagaaagctgttgttgtatttagtaaccatcaagtgagtggtaacaatggtctaaagaaaaaagttgaccagttatcgaagaaatttttaggttataagtaattagaaaaagcatggaaaatagttccatgtttttttgttaataaattattcaagttttatgctaactgaaatcataaaaatataatatactaaattgaacaactaagattgagaaagatggagtattatgtacttaattaattttttgagaaaagtaaaacgccgatttttagtttatttatttaacataaattacaaaccttactcacagcctaccatcatctttgaaagctttggtggacgtcaaatcagcgattctccgttagctatttataaagagttgaaaaaaactcatcctgaatatcgtttgatttgggttgtaaataagggattagcaacccaggcagagaagaacggatatgattatgtaatacgtggctctttcaaatgggttcgaacaatcgaaaaagcccaagtttgggttgaaaatgctcgtttaccgcagtgggtgcggaaacccgatcacataaaattaattcaaacatggcacgggacacctttgaaaaaactcggattagatattaaaaatgttgtgatgcctgggacgaacacggaacgttatcatcaaaattttgttagggaagccaatcgttgggatgtattaattagtccaaatacatactcgactaatatttttcgacgtgcttttggttatcagaacaaaattgtagaaatcgggtacccacggaatgataaattggctaatcccacaaaagaagaaattaaattattaaaacaaaaattaggaattcctttaaataaaaaggttattatgtatgctccaacatatcgagataatcaattttttcaaaagggtaaatattcatttgaattaccttttagtttaaaagaattccaagaacgatttggaaaagatgcagtacttttacttagaatgcattatttaatagcgaattcaatggatatttcaggatttgaaaattttgcatacgatgtatctagttatgcagatatttctgaattatacttagtatcggatttattaataacggattattcgagtgtctttttcgattatgcctatcttaaacgaccaattttgttctatccttatgattatgaaatttataaagatgaattacgcggtttttatttagactatcaaaaagatctaccgggggaaatcgcctacaatccaatcgagctttgggataaaattgaatgcggactagctcagtctaatatgagcatcgaccaacgatttaatactttttatgatcgcttctgcaagattaatacgggaaatgcatcaaaggagattgttgaagaaattagtaaatttatttcaaagtaaaacaaaaaacacgttgaacttcaaaagttcagcgtgtttttattagttgtaattatttcttagcttcttcaatcatcttctgcatcatttgagcttgatattgagcagcatattgtttagaagctttagccgttgtatcagccattagtttcttttgatcactagcactcattgcaggattcttcttaagtgcggcagccattgttgacttcacagtagctgtgaccttagctttaacatacttttcagcatcagctttcatttgagcttgattctttttaacgttcttttgaagcttagcggcttgttctgttgataaggtaatccaattattaggaacgtagaaagtattaacacgttttgaaacttcacggttattaccggcaattccaaaccagaacttgtaagtgttgttcttataagtccaacgggttgtagatttaactaaacgagccgtactctttttagttgttttaaccttgttagtagttttatcagtttcagtatgactaggtttcttttgagaagtagtcttattgtagatataaactcgatctttatcagcggtaccgatactcttatagagtaacatgctcatttgtttagaaggtgagactgagtagatttcttgggtagttgtttcagtaattttatgcatccccaaatgttcacgatcattcattaccatcaaagcaaccgaagcaattacgacgattgcagaaatagcagaacaaataacacggacagctgttttagagataagtgtcatcgaaaggaacgttgcgatgactgcgataattaaaagaaagataatcattatttattacctcctgcttgaggttgtactttggcagtgctacctgctttacgacttacaaagaatgcgatgattaaaccaagggcactaaagccaatggcaatccagaatgtcgcatggtaaccagcaacggttgcgtcaaatgcttgatctttgtaagcgagtggttgggctgatagaagatgcttaccaggcatttggttcttggtaacgttggtcaagacactaaccaagatggctgttccaacagaactggctacttgacgaagagtgttattaaccgcagtaccatgacccatcttttcaaatggaagagagttcataccagcagttgttacaggcatcattgccatcgcaattccggccattcgaacagcatacaagacaatgatataaatcattggtgtagtcttagtaatgaaagcaaatggaagcgttccggcagttaagaggaacattccagtgattgctagacgacgggcaccaattttatcaaataggcgaccagtaataggacttaggaatcccatcattaaagcaccaggtaatagtgttaaacctgaatggaaagctgattcgccacgcacggtttgaatataaagtggaagtaccatttcagcccccaccatggcaatcattgaaactgaacttaaagtagcagaaattgaaaattctggaatctttagcacacgtaaatcaaggaatggtttttctaatctcaattggcggataccaaataaaataacaaagataacaccgacaattaatgtagtaataactactgcgtcgccccagcctttgtctccaacttcagagaaaccaaatagtaaactaccaaatccaattgtagataaagcagctgaaatccaatctagcttcttcttgtcggtttccaaaacgtctttcataaataatagaccagcgattagaacgataaatacgattggaataatcattccgaatagggttctccagtgatagttatcaataatccatccagaaagagtaggaccaattgctggagctaccccaataactaatccggcaagacccatggctgaaccacgttggttagctgggaaaattgtcaacattagagtttggaggagtggcatggtaacaccaactccgagagcctggattaaacgtccggcaagtaaaacttggaacgtaggagctgtgtaacatagaatggttccaattaggaaaacagccatagcagataaataaagtcgtttagaaggaacacgacttgttaaccaggcactaatgggaatcatgataccgttaaccatcagaaatccagttgtcaaccattgaacagtagaagtactgatatcaaaagcatccattaatgtaggaaatgcggtggttaaaattgtttggttcaaaacggtacaaaaagtacctattaatagcacaaggatcaataaggatctcttatagggtttaccatgtgcgtcaattgcttgtggcataagcttacaacctctttgcaaaaacttttctttaatactataagttatcataacgtctttgtcaacttgtttgacaaagatgttagagaagttataattagtttaaaagaagcaacaagatatacagcattaatgaggaggagcaaacatggaaaaccccgcgggtcgcctagcagtggtaaagaaaataattgatagcgaagctatgttactcagtattggtgatgtggccaatgctgtcgatgtatcaactagacaattacgttattgggagaaaaaaggttatattaagtctaaaatttcaaaaacaggtcaacgaaaatatacctattttacgatgattcaagctggtaatattgctagctatattgaagatggtttcactttagccaaagcagctgaaaaagcgcaaagtaacggacgcattatgaaagcgttacgtcactttcttaaagaacgttttagtagcggtcgtgagattcctaatggctatgaatttgacttaggtgaaattaagggtttaccaaaagatcaacgtttgtttatcgaagtgctagaagatggggaaagtttttttcaagttaaaaaagaaagtacaaatgattgacgaataagctatttgtactatatatttattaatgaaatacttacaaaaaaataacggttcatcttcaaggggcagggtgcgattcccgaccggtggtaaagtccatgagctgtcattcgtgatggctgattcggtgaaattccgaaaccgatagttaaagtctagataaaggaagattgaatttatttgcgcagactaacgtaataataaaacagtctaaacaccaatgccccagttgcattggtgttttttgtgtaaataaaccaagaaggtgctcctaaatccaaggaggcagtatgatgagtgtttctaaagttaataaaatggttgtagtcgctatgctagcagctatctcgtttgttttgattttcattgattttccaattttacccggattttcgttcctaaagattgatttcgcggatgtcccagttttaattgggacggtattatttgggccagtctgggggatggtgacagctggtttagccggactgatggatataatccttcgagatagtaatccagcaggtgcattgggtgcatttgctaactggttggcagctttgtcatatatcttaccgatttactacgcaattaaagcggttcaaggtagcacgcataaaaaagaagcgggggccttgattaagggtgtcttaatcggttcggttttgatgacggtatttatgagtgtgataaatttattcattctattgcccttatatatgaagttagcaagtttccaaattaatgtttcgaccttaaatatggttctttatggtgtagtaccttttaatttgttaaaagggattatcgttggaattgcaattggattggtatattttagattaattccgattatcagaagagcttcaaattaaaatggtataatataacctcattagtttagtggggtgaaatttaatgcacatcgaagctcaaagattaacacgtatggcattgctattagctatagtcattgttttgggattaattccagcgattccgattggtataattccagtaccgttgacagttcaaaacattgggattctattaattgggttattgttatcgccgtttgaagcatttttaacaacaggagtatttttattgttggcgttaataggactacccattttgactggacttcgaggtgggatgtccgtttttatcggacctactggaggatatctcctaggatattggattggggccgttttattagcttggtggtcgaagaagcatcgccatgaatggttcttgctatttgcaaaaattgcgactgtagctgtcttaattatcgatttgtttggtagcatgggctttgctgttaatatgcacattccactaatcagagctgtagcactcaatagccttttaatcccaggagatatacttaaagcaatcctggtagcaacgattgcatacaaacttaaataacacataaaagctagaaattatttagtaccgctggagacagcggtatttctaatttttagctttttttaaacttttttaaaataagtgtcgaaaatgctgtattgatgggaacacttcttaaaaaccatatgaactttatgtgataaatatgaatttttttagcccgttatattacaggaattttacaaagagcgaaaaaaatggcatacttttacgtaacgcaattagatttttataaattcactatcaaattagtgaaaattagcaggggggattgtgatgctgaattttttaaagatttatggcaacatgattcagtaaaatttattacgcgaactgttttttactttgcagttttagtcgtcttgttgtacttgtacgattacagcggaatgactggcggaacatttatctataacgaattttaaacgggggatttaattaattatggggaaagtaattaacgtgattgagcaaattgattcaatcgcagttaaacatccagattggattgcttatgattatctaggtactaagaacacatatggagaattaaaagcttattcagatagcttagcttcatatattttaacgcaagggttggaagaagatgcgccaattatggtttatggtgctcaaacctttgatatgattgcaacttttttaggggttgtaaaaagtggacacgcttatgtcccaattgatcgccactcaccagcagaacgattaacaatgattaatgaaattgctaatcctgggatgtgtatcgcggttgaagatttgcctgtaaatttgggtgatctaccagttctagaaggacaagaattaaacgatgcttttaatgcaaataaaaatgtaacacctaatagtttcgtcactaaagatgataattattatattattttcacgtctgggacaactggtaagcctaagggagtacaaatcagtcacaataatcttttaagttttgtgaattgggaaattggcaatctaggtttacctgaacgtccagtgacgttatcacagccaccttactcatttgacctatccgtaatggatttatatcccacattagttatgggtggaacaatcaaagcggtgcccaagcaagttacggatgatttcaaaaaattatttgaaatattacccactttgggcttaaatgtgtgggtttcaacaccatccttcatggatatctgtttgttgcaaccgacttttgatgcagaacatctaccagcattgagccgattcttgttctgtggtgaagaattaacacacgctactgcgcaggctcttaaactacgttttccagatgcaaaaatctttaatacgtacgggcctacagaagcgaccgtcgcagttagtgcaatcgaaattacagatgaggtacttaaacaatatgatcgtctaccaattggatatttaaaagaagatactctgggatttatccttgatgataatggaagaatggccaatgctggtgctgaaggagaattagttctatcaggaccaagtgtttccaaaggttatctcaataatccggaaaaaacggacgaagccttttttgaatatgaaggtcaacgtgcctataaaaccggtgatttagttaagattgatgatactggaatgctttattatcatggacggactgatttccaaattaaactgcatggttaccgaatcgaacttgaagaggttaaccattacttaaataacgatccattaattcaggctggagtggcagttcctaaatatgggaaagaccaaaaggtggctcaattagtggcctatgttgttcctgaaaaaaatgagttcgattctcaaattcaattaacagttgcgattaaagatagtttgaaggataacatgatggaatatgctgttccaaatcgctttgtatttgttgaaagtttaccgcaaacggccaacggaaaaatcgatattaaatctgttattgctgaggttaatgcctaatgctttcattaacaccatatgaaaatccaatgtattttggcatgctagctgtggcatttattcccattgttgtaggaatcctttggggcaagaggtttcgttggtacgaactattagtatcaatcggattcattctcttatcctttggaggacctaagtgggagcaaggcgttgcactagttggatttttaatttttgaagtgattttagtttcactttataacgtatatcgtaaaaagaaaaacgacacgtgggtgttcgttattgcggttcttcttgcgatatcaccactagtggtcgtgaaattaacgccattgatgtcggggactccatcgattattggattcttggggattagttacctgacctttaaagctgtacaaaccgttatggaaattcgcgatggagtgttaaaggattacaatccgtggttctttttacaatttatggccttcttcccatcaatttcatccggtcctattgatcgttatcgtcgttttagaaaagattatgagagcgttccggaccgcgaaaagtatttaaatatgttggaaaaagccttacattacgtattcttagggtttgtctacaaatttatgttggcatatctctttgggacaattttacttccaaaggtacagcatttagctttgcaatcgactggtctgtcgtgggggctggtaggagtaatgtacgtatatagtttctatcttttctttgattttgctggttacagtttgttcgctgtagcaactagttatttcatgggaattgaaacaccaatgaacttcaatcaaccatttaaatctaaaaatattaaagaattttggaatagatggcatatgacactttcattttggtttagagattatgtatatatgcgattagtattctttttcatgaagcataaaatatttaagaatcctaaaacaactgccaatatcacctatgtcttaaacatgttattaatgggtttttggcacggtgagaaatggtattacattgtttacggtctaattcatggggtagccttagttattaatgactggtggctaaacttgaagaaaaagaatccggatcgattcccacataataaatttactgaatacttggcgatttttattacgtttaactttgtttgtttcacgttcctcgtattttcaggatttttagacacattatggttccactaaaaataaaggagaataattaattatgaatacaaaagaaacagttttaaacattttggcagatcttacaggttcggatgtaagtaatagtatggatgaaaacctttttgaaacaggcttgttagattcaatgggtacggtgcaactattactccaactccaaacagaattgggaattatggccccagtttcagaatttgagcgcagtgaatgggatacaccaaataaaattatcgctaaagtagaggcaatgcagtaatcgtgggtaaaaaactttggatgatatttggtccattgctagtcgcatcagttgttttgattgggcttttattttccccattcaaaataaaccgaatcagtccaacaattgagaagcaagccgcgacatcattgtcaccaaatattttaaagggcgatgcagttaagcgagccgccttatcagatccatattatgtaccatttttcggatcgtcagaattttcacgctttgatttgacgcatccctcagttatggcagaaaagtataattgggatttccgtccattcttaatgggagcagctgggacgcaatctttaacgcattatttccagatgcaaggaatcaatcaccagcttaaaaatgggaaggccgtatttgtgatttctcctcaatggtttgtcaaaaaaggggctaatcctcaagcattttcattttatttctcacaactgcaagctgttaactttttacaaaagcagcatggtacaagaactgatcggtacgctgcccatcgcttattaaagatggaacaaaacactgataatggtaatggaatgattaacaaagctcttcgtcaagtagcacaagggcaaaaattatcagcaagtactcaacgaaatattagttattacaaacgtttgttagctcacgaagatcaacttttctctagtttgaaactgaaagatgataatcaaaagaaaattaatcgccagctgcaagctctaccaaatagtgaatcgggagatttaattcgccaagcgattatcaaacaggccaagcaacaaacatcaaataatgattttggaatcaaaaattccttctacagtcatcgactgaaagataaattgggtaagtttaaaggatttgaaagaaattatgactacactaagtccccagagttcgcagatttccaattggttttaaatcaatttgctgctgataaaactgatgtattatttgtaataccaccaattaatcaaaagtgggcaaattatgctggtttatcacaatcgatgctgaaaggtttcaataagaagattaagtatcaattaaagagtcaaggatttgaccacattgctgatttatctaatcaaggttcacaaccctactttatgcaagatacaattcatttgggttggaatggttggtacgctttcgataaaaaggttaaggctttcgttgatggcgaacaagaaatcccatcatacaaaatgaacaatcagttttatgccaagtcgtggcaaaatttagctccagatgatttaaattcgtatatcaagaataacggttaaattttagttataataaaaggaggttaagtcttaatttggcttacctcctttttttagaaggaagtcagtgaaacggaggaatgtatgaaagaaaaaggatttaagttaattatgcaatttgcggtaatgttggttgcactagaggtgctagcaataagtatcaatatgttctacgctcctcacaatgttgcggccggtggagccaccggtatctcaattcttttagaagatgctctaggttggaatcgggctttaattgtatttgttattaacattgccatgttacttgcgtcgtactttactttgggaaaagaaactactgcaagaattacagtgggtagtttactattaccggtctgtatggcgattactcctagtattagtttagtgtcagatcgaaccttagcagttattgttggtggtgctttatatgcacttggagtagcgctcttatatcaaatcgatgcatctagtggtgggacaacggtacctccactaattttgaagaaatacttcaattttaagccatctgtcagcttgttggtaattgatacaatggtttgtgtgatgaatatctttagttccggaattgaagcatttattttagctttattctcatcggtaattactttattagtaatgaactatattgagacaggtatcgatcgtaaaaaaagtgtctatattatgagtagtcacttagccgaggttgaagaaattatctcggagtctctcgatcaaagctatactagcttagatgtacaaggtggcttttcgggggataacaagcgcatgttgatgcttgtagtagaaaactcagaatatcaccgtataatcgggcggattcgtgaaatcgatccccaggcatttattttaactaccaacgttgctgaagtacatggtggacaatattaatttttgaaataaaaacaagcgataacaaaaggtggtctgaattttagattcaaccaaactttttattatcgcttgttttttatactttttaaaagagttatttagcagattttacaatcctagcggcaatcatatcagccatacgtaagcgaacatcatttacaccaggaattggggcaccattagtcagccaatgccgtttttcagtaggaagcccccacaaaaagaaattaggcatgattttaccgttgggagtaactagttcagccgtttcggtagtgacatctaaagcaccggtcttaaataaagttccgtcgctcaaatacaaagagtaaatgcgagccattttattagcaagcaaatttttaattaaaggattttgagttgtttcagcactaggctgtggtaaccgtccttcgattaaaacattcccagaataacgttgatgatcactcaatacggatgaataagttacaaaatggtcatcttcattttcaacgaccatacctggaccggttaaagtgagcacacctgccttaattagggctaaaatttgctcaattctgaacgcaggcggtcccaccgctaaaaagctatttaatgcgttaaagtactttaaaatatatttcacgtaatcatcgtcacttagtaattcgtaggtgacgattttacgaatgttggaacgtaattcgcgtaatttttcaacagcgctcgtgaaaggagaaactttgttaccttcattagcaatatcaatatcttgttggagataagtttttataaaagtggtaaaggaagtagtgtcagtaacactggtaggaattggattctcccaagttgaccaatccacgcgatctttagcgctaatattgtatttatctagaatttttttgaatccattagaagccgtagccaattctttttcaaattcaacggggttaatatcagggtatagtaacttagctaaagtaacgtagtaagttaattcgacgtctaacgtaatacgcttaataaattctgatcctgtaattgattgatttttaagcaccaggttattaacatacgcgtctgatagaaaataacgtggataagtctctccaacttttttctggtctaaaccacgagcatggtaaggaagtcctcgacgagagctagcgtagatcgttggttcatcgccataacgtgtataaattaacgaaccccgttcatcacgctgaaaaacaccaccacgacgttcggttagttcggacaggtaatcaataaagcttaagcctaagccgcgaatgataacctgatcagtaggcgcaatgtcatcaacatcaacttcggcgggatagcgaacgggaacgtattttaaatgatgtgcttcagcaaatgcttgagcctctttttctgcgtcacttggttcatccatcccttcgcccagagcggctgaaatagcatctacttggtatgctaactcatctgtaagcaagatgtacttttcattgtcaaatttgacgttatggatcaaatttgagtgaatttcgatactaaaattactaggcatgcgtttttcaacatgttgaaagaaccattgttgataaataccaaatagagcccgagagctataagagtatttagttaaatgatcaatctcttctaataaaagtttttggcgcttaaaattattattttcaataaaatcttttccaagagttgttgcccattcaaaaagagttggacctaaatgagggttgccttccatttgaattgaatcatccgtaaataaagttattttggaagccagagagttcatttttagttcatgattttggttagggttccaaactcgtccacctattccaaatgggtcaaatatgagtattttaacttcatctgcccatttgcgatctaatgcccaataaactagacgttcaaaggccattaaattacgtggaccagcccctattaatgctattttcatcgtgttgtccacctcatttattaattacagctatgatagcacaataattaaatttaccgtagtttcatagttgaaacgtttacatgtaattatacaactatttagaagttaagccatttgaattgacaaaaaataagtgaatagggtattctaataattgaaaataaaacaaggagtaattctatgctatttacgaatactaaatcagtagttgaagcttgcgcatgttgtctaaaagaccacatgttatttggcaggcgtaaatagcggaattattcaacgaaccaattgggattagttgaaccggttaattacactgcggtgtagttagccggttttttgtttgttaaggacgtgatgatatggaatctgaatgtagcgattgtagggtgtttccaagttgatgtgattaaaattaaaggagtagaaaatgaaaaataaaaagtggatcgggtttctttcggttattttagtatcattggtggtattggcgggttgtggagctaaaaaaggtggttatgctgctgaacaaaccatgaatttagcagctgatgctcccttggacacgctggatgtatctaaagccaatggttatggacaaactggaaatgtatttgaaagtctatatcgcctagggaaaaatggtaagacaaccccaggtttggccagcgaggctaaagtttctaaagatggattgacgtggactttcaagattcgcaaaaatgctaaatttagtgatggtagtaaaattacagctcatgactttgtctattcatggcaaagaacgattaatcctaagactaaagctttgtatgcttacttatttgaagggattaaaaatgccgaccaaattaatgcaggtaagatggatccctctaagctaggggtcgaggctaaagatgatcaaactttcgttgtacatttggatcaatctattcaatattttaaagttttaatgagttacccactattttcaccaattagccaaaaggctgttgaaaaatatggtaataaatatggaacgaaggcgcaatatacggtttattcagggccttttaaagtaaaaggctggacaggaacgaacgatacttggagtttcgttaaaaatccacaatattgggataaaaaagttgttaaattggatcaaattaaatttagagtggtggaaaacccacaaactaagttgaatttatatcaatccgggaagctagattatacacagctttccagtgaacaagttaaaaactataaaaataataaagattacaccacctttccatattccattaccactttcttacaatataattttaatgatgcagataaaaccaaacgtaaagcctttaacaatgtaaatattcgtaaggctatcgcctattcaatcaatcggaagcagttgattgaaaaaatcattggggatgcttcaacaccaagtaagggcctcgttcccacggatttagctaataatccaaaaacgggaaaggactttgctgatgacgcatatttagacggtaccatcgagtacaatcaaaaacaggccaagcagtactgggaaaaagggcttcaagaaatcggagtaaagaatttgaaacttaatttaacttcagataatgaggggaacagtaaaaattatgctgaattttatgcacagtccttggaaaagacattacctggattacaaattcacattgttaacgtgccatcgcaagtagcatattcgagatctcaaagtggagaatttgatattttagttggacattggggagctgactttaatgatccaatttcacatcttcaaattttacaaaaaaatagtgcatataattatggcaaatgggacaacacggaatataatagccttgtgaaaaaagcccaaaatgaagatgctaataatgctgagaaacgctggcaagatatgattaaggcagaacaaattgtgatgaaagaacaagctgtttcaccactttatcaaactgtatattcatacttgaaaaatcctaaagtaaaaggcgttattcacaacacagcgggtacccaatggaactacaagtatgcttatataacaaattagtaacaaaaatgttttattttaaggagaaagtcccaaatgaggattttcttctttttatattgggcaagggggcgtaatataggtggcaaatactaataagatttttggaggatattatgactaagtataaagttgctttatttgatttagataacacccttttaaaaactgaagatgcatctgtggcagcattaacatatgctttaaaccaagatggcgtagaagtcaccccgcaagcaattgttgaattaatgggtcttccaggaattgatatggcacgcgagttaggttcatcgaatccagccaagacaattgatatttttaacgaacggattaatcaagaagttgatttaattaaggaatatgatggaattgatgaaatgtttgctggtttaagagaattaggaatcgaatatggaattgtaacttctaagcttagacgagtttttgatgatgaaatgcgtagttttcctaagattagagcaattgaaaaagtcgtactttcagatgatacgaaaaagcataaacctcatgctgatccaattgaatttagtatgcagaagtatttccctaagctaaatcgagcggatgtgatttatgtaggtgattcgctatttgatatgcaatcagcgcatgccgctggagtcgattttgccaatgctggatggggggcaatcccagcgaatgatttctctgaagcagaatatatattaaaaacaccaactgatttattagagattgttaaataaaaagaagctgtgaatcaaatgaagaggattagatcctagcatttgtcacagcttcttggtttaatatcggattaaatttgaatacttggtacaagccaatcactagctatcaattgatgaaattgtttagtaattggaagccacattttattattaataatatcttttaaacttttccaaaataaaggatcgttagtttgttcggtggtaggataaacaaatatgtattgtccagcgctggttttggctttgattttgttatctttatggccaattaattgaacttcaaggtactggtccatttttttatcgttaataatcatcaagcatcacctttctttactttttcagaataccatggaaaggttaaggaattataaaatataccaataattaagtgcatcttaataaaaatcacgtttacgagtttttagtgattgtattttatggataaaatgctatctttaaaataaagttggtatcttaaaaaggagtacttaatgagagcgttacaagtgttgaagaactgcctatttttagtattactatttggaatggatcaattggtttctattccacaactagtagcagcatatacacaaaaccatcatctctttttattttttctaataatcgtctatattgcgattgccatagcagttatcgtctttttctggcaattttatcgatataaaattaaaaaaaatcatagtatttatggggatttaccaccaagaagggtgcgaactcaaacaatgctgctaatggttctagtttggatgatttttatgctttttcaaatctggtataccaatcaatttaaagttaatatttctgctaaccaattagcaatcgaaaaactatttgaaaaacaaccaatttggacattcatcgatggcgtgttggtggctccagtcatggaagagctcatttttagggggattttctttgaattatttttccaaactgatcaaccagtaataaaagtaatcggagtgatcgttaatgcagttatctttggtgcattgcacgatacaggaattaattttcctatttatgcaatcatgggcgcaattttagcggttacctacatgcgtacccgtgatattaaatgtagtattggaattcacatcttaaataattttatatcttttatttaataaaaaacggaggatttacatggatagtattttaactaagggaagtcccatcaagggcattattttgttcagtatcccacttcttttgggaaatattttccaacagatttatacgctttctgataccttgattgttggtcgagtagtcggtgtacaagcattggcttctgtcggggcaaccaatggacttacttttttgattattggatttgcgcaagggatgacaacggggttatcgattattacggctcagcactatggggctggggatgttaaggcagttaagcaaagttttgctacgagtatttggatttgtggtgtattcgccttaatgctgacggtagttagtgtactggcggctagaccgttgctagaaatgatgcaaaccccagctaacattattgacggtgccacgacctttttgacgatcatttttggtggtgtgcttgcaactatgttttttaaccttttctccaatatgttacgggcgttgggaaatagtcgtttgccactcgtatttttggtaatcgcctgtattatcaacgtggtattggatattattttgattgtctttttacacatgggagttgctggagccggaattgctacggttacggcccaattaatctcatgctttctatgctggttctatattaagtctcacgttccggttttatcgcttgaagtaaaagaaattaaaacaaatatgaaattggttcgtgaacaaatcaagattggattaccaatggggtttcaggcgtccattatcgcgattgggtcaattatcctacaaatttctttgaaccatcttggatcatcagcaattgctgcttatactgctgctgggaaagtcgatcagctagcaacgcagccaatgatgtcactggggatcacaatggcaacctttacggctcaaaattatggggccaaaaaatttaaacgtattttgaaaggtattcgtcaaacgttgatcacttcggtcgcttacagttttattgtgggtgctttaattattttgaatagtcgcgtactggttaatctatttattggaaattcagaacaacatatcaccaacttggcgcatgaatattttgtgatcgttagtgcgagttatttcttgctagcaatcttgttcatcatccgatataccttacaaggattcggaaagagtgtggccccaacgatggctggggtagccgaattgatttcaaggatgttagtgggactctttgtggttccggcttttggattttggggagcatgtaccgctaacccattggcttggttaggttcaaatttagtattagtttattcatacgttcaagttgtacgacaattgagaaaacgtgctgagccgtagaaaatgctaaaagagcgtgaacacgatataatcgaggtatagaaagtaaatgcgttgggggtagagtgatgatttttacttataacgttctaaagaatgtaattgataccgggaaaccgattatcattaatgatcagagtcaaattaaaaaaatggatagtgatcaaatcgatgcaatcaccttcatttcagaattgagaaatgaaagagattactatgctttcttagaattaaacccaggaaaaggcattgttttttattccgatggtaacacctttgatggctttacggtttttgagatccccttaagtgagttttatttcgaagtgaatacagaaaagggcgtcattgatattgaagacggagttggaaatcaaactgattttctagatctctttacaggaccagttatcgaggatttaactaaaaaatatcgtaatgctactgatgaagaaattatccagagtaatgaatatcaaatggcggatcgttatattagtgtttatctgggctacagcgatggagatgaacaaaaggtcaatttaaccctgttgaaattcgcaatggcgatttatatcgaccaaaatgaatcaaaataattccagtaattttacagtaagattacaactgttgcttttttgattgcagggagtataatttcttctgttccagtatttatggttattttttggaggaagaaaaatgatttttaaatatgatgttttatcaaaagtgatcgaagaagataaaacaatcaaaatcaacgaaaacagctacatcactaagatcaaaggtttaaacggcattgattatagtgtgagtgatcataatcgtcacgattactatgtattcttgccgcttaacgacgatgagggtgtagtaattagcacggacaatcataccggactgggttttgaattgttgagaatacctaagcgagagttttgtttgggaattaatacaaataataattttgtcgattactatgatggaccaggaacacagacggattttcctgatgtaattgaacaagaagaacttgatcaaaagtatattcaatacaacgatgctagtgacgaagaattaaaagaaactaagctataccaacaggtggatacatgtgtaagtaaatacttacgtgttagttcaggtctagaagaagccttgaacttagctattatccgcttagcgttcttggctcatactgttaaccaacgtgcggtggcatagtttatagaacaaaataaaaaggagttatggcttaagccgtaactcctttttattccgctttgttatctgtaggctgtgtaaagtccaagtgatccaaagcattataaaatgcaccgaaaaggtcagtatcctgtttaaaaatcgaagtttcaattaccggcatttccagcatttctttaaggaccggaatcgtttctcgaataatttgaatttggtgattaatttcaggaacgagaatactctgattactaattcgtccactaatgacgtacttattaaggtcaagaacggcctgcgtattcacaatcatgtaagctacatttcgacaatatgcgttaaacatttcgcgagcgttagcatctccattttcaatcgccttaaatactttgatatcgtcattgggatcagataactctaacgcactgccgatggtgttaatcatttttgaggcagaacaggcgttgaacatgatatcttcaggttgatgattttcaaccgttggattggcaataatcatgccaattccgcccgcttgtaagtgggaaccagaaaaaatctggtgatttaaaactaagccagaacttacaccatcatcaagggcgatggttgctccgttagtgacaccctttaaattaccattccattgagaagctaaagtaacacaaaaaccagtactttccatcgacaccggtaattcgtagcgagtggcaaggatttttccaaggctgagtccgtggagcatgggcaacgagcccccctgataaattacgccatctttttggtcgacttggccaggaacactaagtccgattccataaatcgatttaagatggtcagtaacaatttcataaatttgttttagaaaattttcaacgctatcggttggcgttggaacttgtttttttactttaagactgccgctttcgtcaaatagtgcgtaacgaataaaagatgcactgatggcgatacttaagtagttcgtattattcatataatcattcctttgtgtcattattatacattgattgagaacgatttcaaagttacgaatgaggaataaagttttaattagtaaaaaaagacgctatagtagtaagcaataccagactgaagaggtaagactatgaaagtatttaatctattaaataaattaagcaccaaagcagttattttcattattttggtagtagggggattaatttttaaaggaacctacatcgtaagtaatatttattttattttagggatgcttttactattatggggaattttagcaattttattcaacgctcacttatttagtggatggaaattaaatggcaatcgaaaaaacagtgaatttgttgaaaaaattgagcataaagctgtccagtctaaaactgagcgggcaaaagaaattgctgcacaaaaaaacgagcccatgcggttcaccccatttactcgtttaatactaagctatgctttgattttaattgttaatgcgatcctagtttcatttttctagtacaaatttttgaatggctttggcaacgccactttcgttattattggccgtaatgaattgtgcattttgtttaacttcatcaattgcattttccattgctacaccagttccggcagctttaatcatggaaaggtcattaccttgatcaccaattgccatgacttggtctaaagtaaggttaagacgtgcagctaactcagttacagcattacctttgctaacgttttggggcataagttcaataaagtatggttcactttgaacgacgctaaagttgtcttggaacttagcaaaaatctggtcgcgcgctttacttaaaactttaggatcgtcaatgaacattaccttgggcatttctaagttagggtccatttcattaacggcgcgatagcgaagacccatttcaactagaaaactttcacctaccgtataagtgctgatattcttattggcagtgtaaatgtgatttttaccatctacgtggaaatgcacaccaattttacggctaaatgcttcagcagtgagatagtcttcaaaggaaagtgtgtgtttaatgagggtttcgccagtcagagtttgagcgagtgctccattataagtgatggcatattccttttcgttagtaaggtctagttgggtgaggtaacgttgaattcctgtaatgggacgtccggtacaaaggacgacgttaaccccgattttagaagcagcgttgatggccgcgatgtttgcttctgtaagttgtttgttgtcatttaaaagggtgccatcaaggtcgatggcgattaattttatactcaagattattactcctaactaattatattgtttttgatatgagcttgaaaagcttcaaaagtatctgtaaacaaactctcgttactatctataagcatttccttggggaaaaagaagcgctcgtcacgagaaactttacctgaaattgctcgtactaaatcactaacggtcgaaagttcgactaggctaccatccgattgcattagttcaatttgagtccgtggttttttagaggttggatcataggcatcatatggtaagtcataactgtcattttcagcagtataatattcagaatcaaaaccagcttcagctaccaattgttttaattcaggtagaagactccgagtttgatcggtgatgcgtgctgattttaaaggaatacgatccaagaagcgataggcaagatcacttaaaataggatcttcatcatccacccattgaagaaaatacgtatttaagacgccgtcatctagttttaaataatcatctaacgtaaaattttcatcaaaaaacggcattaagtaatgaggttgaaagttacgttgtcgatggttagctcgctcagactgatatagctggttagctaactttaagagatgtccaagaatgacctccatagaacgggaaacagaatgaaaataaacttgaacgtacatttgaaaacgacttacaataaaatcctcgacggcatgaatgccattcatttgaaaggcgataccatgctcataaggacgcatcacacgtaagatgcgggttaaatcaaagtttccgtagttagttccggtgtagtatgaatcacgtaaaagataatccatacggtcggcatcaatttggctagaaattagctgtactacttgtggattaggataatcatggctaattacagaagcgacctttgttggaaagtcgggactaatacgtcgtaaaacttggttaacttcggtttgagggtccgtaataatccgggtagtaaatttttcatggtcggtattaaaaatatgttcaaatgtatgcgagtaagccccatgaccaatatcatgtaagagggcggcgcaaagcgttactaaccgttcatcattattccacaatccatcactgggagtttttgaaggataatttcgagcaaagctttcaacgatgcgacgtgctacttcataacatcctaatgaatgtgaaaagcgggtgtgttcagctccatgaaacacaaaggaagtggttcccaattgatgaattcgacgaagacgctgaaattctttagtattaatcaagtctaaaatgacttggtcttgaacataaacatagtcatggataggatcacgaaagactttctccatcggtaaacgttgattttcttgggacatcttactaccttcttactttgtaattttaaaaagaaacatctacctaaaattatacaagttttaaggtgagattgtaaaagcttaaagctagaataatatatgaaatgaattataattattacattagaacagtgaacaaagaggaggattcaaatggctggattaaacaatggcattccaattgaaatccatttagagacatttattgaacaagaaggtgaaaaaacacacctagctttcgacgaacccggacagatttttcaaatgggcgattcactttacttaaggtatcaggaaaaaaatgaagaaactggaaaaaaatcacccgtaaccatgaaaatcgatggggatggcaatgtcctattaacacgttcgtctgagagtgaaatgcgtttgcgttttgctaacggtaaaagaattgaagcgcggtatcgcacgccttacggactttttccgattgaaacagtaacaccatttctagagatagaactccaagaaggaccccttgcgggaagggtaaacattgattaccaactttttgcaggagaacagttgattggtaactacaaaatccgattgcaatttactgcttaattgtagtattatttgagatagactgtggaaaggacgtgcaccagttggaattagaaaattttaagggtcaaaacaaaaacgaactctcaatgatcgaagttgcccacgctattttagctaagagtggtgaaccaatggcttttgttgatttagccaacgcggttcagagttatttagataagacagatgaggaatttagaaatcgattatcacaattttatactgatttaaacgttgacggaagttttatttccttgggcgaaaatacatggggacttcgtacttggtacccattcgaatcaattgatgaagccttaattcacgctgaagatgaagacgaagaccgtcctgtacgtaaaaaacgtaagaaggttaatgcctttcttgctgatgcagctgatgacgatgatgtaattgactacgattctgatgatccagaagatgaagaagtcgaagctgaagatactacatcagatgacgctccagcatttgaagatctttctaacgatgacgatactgatgttcttccagatggaattgaaggtcaactatcagaattaaacgaagatgacgaaaactaaatatacaaacttgacttatagtctgtaactctgtattatattttttgggctctggagatccttttgaggatttttcagacaatgaacggtaataccccctattctcagaatagggggtatttttattgttgtatcagtatttcaacagtaaaaacaactgttttgcgtttcctaatttaaccagtcataaatgttagaaaaggagaattttaatgaccaaatatatttttgttacaggtggggttgtttcatctttaggtaaggggattgttgctgcatcccttggacgtcttttgaagaatcgtggacttaaggttacgattcaaaaatttgatccatatattaacgtggatccaggaacgatgagtccttaccaacatggtgaagtttttgttactgatgatggaacagaaacagatttagatttaggccactatgaacgttttatcgatattaacttaaacaagtattctaacgttacaactggaaagatttattcagaagtattacgtaaggaacgtcatggcgattatcttggtgcaactgtccaagttattcctcatattacggacgcaattaaagaaaaaattatgcgcgctggtaaagtgactgattctgatatcgtaatcactgaaattggtggaacggttggggacatcgagtcacttcccttcttggaagctatccgtcagatgaagagtcaagccggatcagaaaatgttttctacatccacacgactttggttccatacctaaaagctgcaggggaaatgaagacaaagccaacgcaacacagtgttaaagaacttcgtggtttgggaattcaacctaatatgttggttgttcgtacagaagaagatatcacagatggtatgcgttcgaagattgctgcattctgtgatgttgagccagaagctgtaattgaatctcaagatgttgcaagtttatacgaaattccattgaacttaaaagcacaaaagatggacgacattgtgatggaccactttggtttgcaagcaccacaagcagacatatctaagtgggaagatcttgtcgatcacgttaataaccgtttgaaccataccattaacattgcattggttggtaaatacgttgccttacaagatgcttatatctcggtgaatgaagcgttaaaacatgcaggttatgttgtcgatgcagacattaagattaccaaaattgattcagaaaaacttactaaggaaaatgttgctgaacaacttgccggacaagatggaatcattgttcctggtggctttggtgatcgtgggattgaaggaatgattcattccattcaatatgctcgtgaaaatgatgtgccattcttaggaatttgtttaggaatgcaaatggccagtgttgaatttgctcgtaacgtattgggttaccaagatgctaattcggctgaaatggatccagcaactaagcacaacattattgatttaatggctgatcaagaaggtgttaaagatatgggtggtactcaacgcctcggtctttacccatgcaagcttaaagaaggatctgtagctgccgccgcttatgacaaccaagaaatgattgaagaacgtcatcgtcatcgttttgaatttaacaatgactatcgtgctgaaatggaagctaagggtcttgtattctcaggaacttcaccagacaatcgtttagtagaagtagttgagttaccagaaaagaaattcttcgtggcagctcaatatcatccagaatttttatcacgtccacaacgtccagaaggattatttaaggcatttatcgctgctgcaaataaataaacataaaaatagtcgaatttttcggctatttttttatttgttgcgttcatgaggttgtatttttggaacaaattatttatgattgaggttgactgtaaaatacattccttaattttaaagtacttaaagttcgtttgtgaggaaaaaccatgaaaaaaatgataatcaagggtggacagcgactgtctggagaagtgaccatcggtggtgctaaaaatagtaccgttgcgttgattccggctgcaattttggcggatactccagtacggtttgattcagtgcccgacatacttgacgtgcataacttaatgattatccttgaatcgatgaatgttcattcaacgtttgaggatggagttatggtgattgatccaactgaaattgttgagaatccattgcctagtaaggcaattaagagcttacgagcatcatattactttatgggctctttacttggtcgtttcaagcgttcaacagttacatttccaggtggagataatattggtccaagaccaattgatcagcatattaaaggcttcaaagccttaggtgccaacgttacagaagatgaagatacagtgtacatttcagcatatgatcgtggactccatggagcgcacatctttttagatgtggtttctgtaggagcaacgatcaatgttattttggctgccgttaaggcccaaggtattacaacgattgaaaacgcagcacgtgaacccgagattattgatttagcaatgtttttaaataatatgggggctaaaattcgtggagcagggactgatgttatccggattgaaggtgtggataagttggtttctacagctacgcataccattattccggatcgaattgaggctggaacctatctgtctttagccacggctgtgggggatggtgtgatggtaaataatattattccagaacacctagaatcgtttacttcaaagatgcttgaacttggcgtcgatattaaaattgatggcgataagatttttgttcctaaagtggatcaattaaaagcaattgaagtcaatacgagtcctttccctggatttgcgactgatttgcaacaacctttgacggcttccctattaaaagcaactggtcaaagtgttgttaatgatcatatttatccagaacgtatcaaacacgtaattgaattacaaaaaatgggtgctaagattaaacatgctgatggagtgatttatattaatcattctgaaaaacttacgggcgctgaagttgaggctggagaaattcgggcaggggcttgtttaatgattgcagcctttatggcccaaggcactacaaccatcacccgagcagataacatcctacgtggatacgacagtttggttaaaaaactaactaagctcggagcagatgtttcaatcacgaccgacaatacattgtagtcaaagatataggagagttaagtcgatggataattttttaacaatgaatgacttgcaagaaatgactctcaaagaaatatacggccttgcccgtgaatataagatttcatattacagccagatgaacaagaaggaattgtctctggctgttttgcgtgctcaggctaaaaagaagtcatttgttgaaatggaaggcgttttagatatcgttggaaatgatggatatggttttttacggccaatcaactatggttcttcgcaagaagatatctatatttcagcatcgcaaatcacacgtttcggtttgcgtaatggggatttagttggtggtgaagctcgccatcccaaaccaggtgaacggtattatggattaatgcgggttacttcagtgaataataaggacccagaagaagctaagcaacgtcctcattttccagctctaacccccatctaccccaatcaacaattaaaattagaaacaacttctaatattttatcaacgcgattagttgatttgttttcaccaattggatttggacaacgtggtctggtagtagcaccacctaaagcaggaaaaaccactttactaaaggctattgctaacggaattaccacaaactatccagatgtgaagctcattgttttactaatcgacgaacgaccagaagaagtaacagatttagaacgctcgattaagggagaagtggtttattccacctttgatcaagaacctcggaatcatactcgtgtttcagaattagtattacaacgggcgcttcgtctagtagaagataaacaagatgttgttgtcttgctagattcaattacgcgattaacccgtgcgtataatttagtgacctcccctagtggtcgaactctttctggtggggttgatccggcagcgttttataagcctaaaaaattctttggctctgctcgaaatattgaagagggtggatcacttaccatcattgggacagctttggttgatacaggaagccggatggatgatgtgatttatgaagaattcaaaggtacgggtaattcagagctagtcttatcacggaatttagctgagcgcagagtatttccagcgttagatatccgccagtcaggaacacgtaaagaggaactaatggtctcaaaagatatacttaatcagctttgggatattcgccggtcgatgcgtggagatgctctggagtatacggaacaagtgcttaagttattgaaaaacactaaaaacaacgaagcgtttattgctaacttaaagaatttaaatttaggtcctaatggtagtaaaaaatcttaatcgaccttgtttaagttgtttttctatgctattattggggacgttgatttataataaataactatgactcagcaaatgactcatggcaaaggagcgtaatatcgtgaaaaaaggaattcatccagactatcatccagttgtatttcaagattcagcaactggctttaagttcttgtcaggttcaactgtaggttcagctgaaacaatcaagtgggaagacggtaacgaatacccattgattcgtgtggaaatcacatctgactcacatcctttctacacaggacgtcaaaagttccaacaagcagacggtactgttgcaaaattcaacaaaaagtacggtttggcttaatcataaccattggttatcaaaaagaggcaccgctgaatttatcagtggtacctctttttttgtggtctgaaatatagtttaggattgcttctcattaatcgacataacacagcgttactaacttgatttatgctactgatcgtccgtttaaccaacggaataagataaagttaattaaaactaatacagaagtagcaataaagacagcgttatagtcaaataaaccagagactgcagagcctagtaatgggccaatcatatttccgagtgcttggaaagactggttccaactaaatacacgcccagttaccgcagcaggtgttcgtttagataaaatactctgaaccgctggtagcatcgctccatcagaaattccgataaagaagcggaaaactcctagccaaaaaatagaaggaacaaaggccattggaatgtagaataccatggcgaagagaaaggccacggaaagaactttttcggttccaatctggtccccaagttctcctaagcgcggagccgctaacatgttagcgattcccggaattgcagcaattaaaccagcaaccattgttacaccagccccattatgcattaattctttaacgtataaactaataatcggcgcgattgaattattagatgcttgaataatcatcgttgtgataaacatgccgaatacggccttaggctgatttagtttaccaattacctctcgagcagaaagcgaaccagattcactttctacgggaacgaagtgttcatgtaccaagaagaaacttaggaaaaagacgattagtaataaaccacctgtaataaagaaagttactcgatatgaaaaaatagaagctagtgcaccaccaatgaggggacctagtagagatccggatacaggaccagtagataaaataccaagtgcataaccacttttttctttaggagtttcggtagcgatgagtgcattggagttactaatataacctgcaaaaacaccttgtaataaacgaaggccaatcagttgaaagacgttttgaacaaggcccattgcgcctaagacgaaagccattccgagtgaagctcttaaaatcattacttttcttccacgcttatccgcaatttttccccaaattggagaaataattgctaaaattaagaaagtagaagaataagttagaccactataaaaagatagttgcgattttgagaagtcaccgagtgtgttgacataaagcgacaaaaacggcataatctcactaaatgcgaccccggctatgaaggttccgaaccaaagcacaaaaagattttgttcccaaggttcacgtttctttctagattgtccttttcgattgaaaaacatcataaaaagccctctttcaaaaaagatataccaatatacaataccataaaaattaaaaatagtaatggagcaaacgtcaatgagtaaaaaactaaaaaattggttagtttcgattggattaacattattggtgctactaagtttagcgatgatttttaatcgtcaaatcaaaacatggatggtagcacaatataatccagaggtgaacgagaaagtggttgctaaaaacactgaaaagaaagccaattttgactatacaaaagtaaaatcattggattggcagacggtcctaaaggcacggacttcggagaaaagaattaaagtgattggtgaaattgtttaccctgatataaacatacaccttccgatcggcaaaggggtcgataatcttacgttggcgttggcggcgggaactttaaaagaaaatcagcgaatgggtgaaggtaactacgcattggctggacatcatatggttgataaaaatgttttatttagtccgctttattggaaagccaaaattgggcaaaaggtttatttgacagatgagaccagtatttatgagtatcgggtagacacccgtaaatttataaaggcgaccgatgtgcaagtagttgacgatattaaaggtaagaaaattttaacgctggttacctgtgatgatacgggagcgggtcgtttgatgattcgggctaaatttatcaagaaaatgagtcataccaaggctccggaagcagttcaaaaagagttttcagaaaagtttaatcgttaagaaaatttagtgttcaaattcatataatttgcttgacgaatttgttactattaatatcatatataggaagttttgaaaggatgggattgaatggtaggaatgataatagcactaattgtaattgtggtgattgtaattgcgatcgtctcaatgtacaacggcttggtaaaagctagaacctatacacaggaatcatggagccaaattagcgttcaaatgaagcgtcgaaatgatttgattcctaatcttgtaaatacggttaagggatatgcagcccatgaaaaagatactttgagtaaagtggtggcacttcgtaatcaattagtggatcagactgataattcagccccttctactaaacaacgtgaagagattatgaaaacttctaaccagattagtgactcacttaaaagcatttttgctttatctgaaagttatcctgacttgaaggctaaccaagaatttactaaattaatggaagaattaactaatacagaaaataaaattgcttattctcgtcaactatataattcgagtgtagcaagttacaacattaaactacaatctttccctaataatttaattgctgggatgggtggatttaagccggttgattatcttcaagttcctgaagaagaaactaaaaacccaaccgtttcatttgataaataattaagaggtcgattaatgttatatcaacagattgcaagtaataagcgaaagaccgtttatgtgatgatcggttttgctatcttagtattgtttattggtgctgcagttggttatgttttctatgatagtgcaatggcagggattattatggcggcagtaattgccgctatttatatggccatgatgattgccaattctactaacgtcgtgatgggaatgaatcacgcaactgaaattagtgaagccgatcatccggaaatttggcatattgtagaagacatggccttggtagctaatataccaatgcccaaggtttatattgttaacgatgccagccctaatgcatttgcaacaggaaatagccctaaaaatgctgccgtagcagtgactactggtattttagaacggcttaatcgagaagaacttgaaggtgtaattggacacgaagtttcacacattcgaaattatgatattcgcctttcgaccatcgccttggcattatcttcggcgatcgcaatgctagtaaatattggaatgcgctcattttggtggggcgggggacgacgtcgcaatgataatgacaatgaaggcggaagtttggaaattgtgatgatgattatttccatcgtattggtcattttaggtccaattgccacaactatcgctcaattggctttgtcacgaaatcgagaatatctcgccgatgcctctagcgttgaattaacacgtaacccactggggctaatccatgctctacaaaagatatcggtcagtgaaccgatgaaagaagccgatccaagtagtgctgcactttatatctctgatccatttaaaaagaaacgtaccatggcacatctatttgatacgcatccaccaattgaagatcgcattcaacgtttggaaagaatgtaagtatatagttaattgaaagagagttatgggatcatgcgtgatgactatatttttgtacatttagaatcaattgttaatttaatttattcgcgcgggattacggcaaatgattttctaaagggagtcttgcaaataccaaccaatgttttattattaaatcgggaagtcagtgatgatttaacgattgataatcatacatttttaaatgaaattaatggcgctaaaaaagttagtgagtatttaattggaaaccatggcccacgcaattggattgatttttctcagcgagatgcgttgagtgagctcacgccggctgatattgctaatcttttatatatggggcatatgaaaactcataatgatacgccattttcgtataagctccaaaacgactatgtttatttagacattggcgaaaatcaggtgaagacctattatcgtcgtctaaaaaatttttatttagttttgaatcaatctattattcgtcatgctgaacaagcttataacgagcatcgaattgtatttcgtcggggaaataaatttgctgaattaccagctggaatggttcgacaattaattcctgtgttaggagaaggattaatttttgcgtttgatcaagcttttgagcaagatcgcgaatatcgaatcccgattttgattgctagcgacagtaatttggctcctacgttacgcagcaaagattcactttataataatgcccaacaaattgcgattttgaaatataatctacgtagtaaacattggcattttattattactaacccgcaagcctttgatgcggatgcattatattaaattgagaacttgtgtcagataagatataagttctcttttttagcaaaaaagggtaattattttggggataagatgtttagtctacttttaaggtaagttaatttaatgagctattatggtataattgtagccaggttttttaatttaaggggagttttaaaaagatgaaaatgcaacttagcgaaattgcgcgcgctcttggaacggatgaatatcctgaactatggaacgatattagcgtaacgagtgttcaatttgatagtcgaaaattatctccaggatcactttttgtgccaattatgggtgaacgtgacggacatgattttattagtcaagcagtaacagcaggcgccgttgcaactttatgggcggaagaccaccaagaacggcgtccagctgatttaccaagtattctagtaaaaaatccattagaagctctgcaaaaacttgctaaatattatctggataagattaaccctaaggtagttgctattactggaagtaatggaaagacaactactaaggatatgactgcagcagttctggaagcagaatataatgtggtaaaaactaaagcaaactttaacaacgaactgggcgtgccaattactattttgggaatgagctctaatacggaagtattggtagttgaaatgggaatggatcgtccaggacagttacactttttaagtgaattggttcaacctgatattgctgtgattacgatgattggcgaagcccatattgaattttttaagacgcgtgagcggattgctgatgcaaaaatggaaattacagatggcctaaaagaggacggttgttttgtttttaacggggatgaaccgctattagaacagcgtgctaaagacctcaatgttgaacaataccgttttgggtttaaagcagataatgatgtcagcgccagcgatatccagagaactgacacaagtacaatgttcaaaactaatttggatgaagaaaccaccgtaacaattccagtattgggtgattacaatgtaactaatgcattagcagcaatcgccgttggacataagtaccatattgacctaaaaaaagaagctgaagcgctagttgactttgatttaaccaaaaatcgaacagagtggttaactggaaaaaaaggcgaacgtattttaagtgatgtttataattctaatccgactgctgctcgagcagtattggattcatttgctaacgtaaatactgaaggacgtcgtttggtagttctaggagatatgttggaattaggtgagaatgctgatcaaatgcatgctagcttagctgaaaaattaaatgccaagcgttttgcgcaagtatatttaatcggcccacatatgaaagctcttgaaaaacgactgattgatgaagatatctacagtaaagatgctgttcattattatgaaactggcgaattaaagcgacttacagatgatctttcaactgaaattcaagcagatgatagtattttattaaaagcaagtcacggaattcatttagaaaatgttgttgataaaattaaaaattaaaaaataaagttgtgatgtggcttttagattttttacagcgtatgtaaattattcttaaaacgcggttgccgacctttgagtggggaatgctagcctaaatatcacaactttatttttattaaaaaggccaaatagagctgttttaacagcgttttcaagaacttttgtttgctaatccctaagcaggggtgtatgattataaagttatgtttacacgattgtcaccgtgggcgcggccctaaaaggacggattttctttgatgcggtgacgaaaatttaggaggaattatatttgaaatttaccgaactagggttagacgaagacattttaaaagcagttttagacaatgggtatgacgaaccaacacctatccaagctgaaactattcctggtgttttagaaggaaaagacatcattggacaagctcaaacaggtactggtaagacagctgctttcggattaccaatcctacaaaatgttgacctagataatcctaacattcaagcaattattatctcacctacacgtgagttagctgctcaaacacaagcagaaatctttaaattaggaaaatataaaaaagctaaagttcaagtggtttacggtggatcagatatccgtcgtcaaattaatgctttaaagagccatccacaaatcgtggttggtacacctggtcgtttattggaccatattggtcgaaagacaattcgtttagaccacgttaaaacattagttcttgatgaggctgacgatatgctagatatgggattcttacctgatatcgaacacattattgaacaaacacctagcgaacgccaaacattattgttctcagccacgatgccagcaccaattaagaaaattggtgttaagttcatgactgatccaaaacaaattacagttaagtctaaagaacttactgctgatttggttgatcaatactacgttcgttctaaagaattcgaaaaatttgatattttaacccgcgtacttgatgtacaagcaccaaaacttgcagttatttttggtcgtactaagcgtcgcgttgatgaagtttctaagggattagttactcgtggttacaatgctgctggaatccatggtgatttaactcaacaacgccggatgagtattttacgtcaattccgtgaaggacaattagatattttagttgctactgacgttgcagcacgtgggcttgatatctctggtgtaactcacgtttacaactatgatattcctcaagacccagaaagttatgttcaccgtattggtcgtacaggccgggccggtgctacaggtacttcagtaaccttcgttactaactgggaaatggactatcttcgtgacgttgaacatttgacaaagaaacgtttgttaccaatgaagccaccaacagaagaagaagcttttgctggacgtgctgcaatggctgaacaaagcattgaagaattggttcaaaaaacagatgttgctaagttcgaagaacaagttgatcatcttttagaacaacatgatgctaaaacgctggttgctgcacttctaaatgaagtaactaagtctgacgctagtgaaatcaaagttaagattactcctgaacgcccacttcctcgtaaaaaaggtggcaacaaaggcggtaaaggtggcggcggataccgtggcggaaatcgtcgtggtggtaatggtcgtcgtagtaatggtaatagtagcaatggcggaggccgtggtggtaaatggaataacgatcgtaagggtggcggcaagtcacgctttggtcgcgatgaccgtaaccacaatggtggtaagcgtaatgatcgcaactcaggtaacaagggtggatcaaaccgtcaatttgtaattaaagaaaaataaacattttcaataaactaagaggcccggaaaatacattttttcttgacctctttttttgatacaataggaacgacattggaggtactaggatgatttacggaattggcattgatataacaaacattgatcgatttaaaacactccacaatccagcaacgtttatccaaaaggttttgacgcccactgaatttgatgagtttgaagctaagaaaggtcaacgcgcgtatgaatttttagcagggcacttttcggttaaagaatcatatagtaaagcttacgggacaggattaggtaaaaaacttaattttcaagacatcgaaattaattacgatggggttggaaaacctaagattgttaaacatccgtttagtggaaccgtacatgtgtcaatttcccattctgaccaccatgttgtaacacaggtaattttagagggggataattgaaatggttgtagggatacatcgtcccagcaagctagttattaatgctgaggcaattagaaataatgtaaaaaatgagattagtcgattagatggacacagtgaattatttgccgtggttaaggctaatggctatggacatggaattgtagaaacagcccaatttacgaaacaagctggggcaactggtttttgtgttgctatcttagacgaagcgttggctttgcgagatgctgggctaacagaaactatcctagttttaggaattacagatgttaaatatgctaaattagctgctgaaaatgatatctcgttaacggtgggtgatcaagcatggctagatgaagctacgcaaattctagatcaaaagccgctgaaagttcatttaggtattgatacaggaatgggacggattggttttcaagatggagcttcttttaagaaagcggccgattatcttgaacaaagtcaacagttcaattttgaaggtgtgtttacacattttgcaacagcagatgaaaaggatacgacttatttcaatttacaggtggaacgttttaaccatttcatcagccaattatctcgacgtccacgttatgtgcatgtttctaatactgctaccagcttgtggcatgcagcttgtaatggtaatatgattcgttttggagtcggcatttatgggatgaatccttctggaaaaacactggaaagtccttttgatttacagccagctatgagtctggagtctgaactatctttttctaaactagtgcaaaaaggccgttcaattagttatggagcgacttatacagctaaagaagatgaatggattgggacgatcccgattggttatgcagatggttatgaacgtcgtttacaaggattccatgttttgattgatggtcaattttgcgaaatagtaggacgaatttgtatggatcaaatgatggttcgcttaccaaagtcatatcctgtgggaactaaagtaattttagcgggaaaatcaggcgaaaaatcaattaccatgacagacattgccgaatatgctgggaccattaattatgaaatcacatgtggattcacacaacgtttaccacgaatctatactgaaaatggtgtagtaaattaatgtattgaatgctaaaataatgttaataattaaatagtacaggagagcaatctaatgagtattcaaccaaaagatatgtcaattgagaaagagacttactgtgaaatgtttggttttgaacctagttgtgtaaatgatgatattgtaaggagcttttttacccgtcacgcaactgagcatcttgaacagcttaaagccggatacctccaaatggctgatatcaattccgaaattactcatgacttttcttcatgtgaagcggattgtgaaaagcatgtgcttgaacgttactaagttaaattttttaaattaaaagttaatggggtgacactgtggacgagtcgaagataagacgcggtgatttattctatgcagacttgtcaccagttgttggttctgaacagggcgggatgcgaccggttcttgttatccagaataacatcggtaatcactatagtccgacggtcattattgcagcaataacggctaaaatttctaagcctaagatgcctacccatgtaggaattaaaggtggagaacaaggagtaggccgtaattcagttattttaatggaacagattcgaacaattgataaacaacgtctacatgataaaattggtcgattagatgaccagaagatgaaacaggtggacgaggccttaaaggtaagtataggtctcgtaccgaatacatagaatagaaaatgtgaacaaagtttcacgctcaaattttaaaaccacctattccaagatagaaaaaaggattcgcaaactgtgaatccttttttatttacgaactataaacgatcttgttttaggttttcaacttcaggaactctgaagcctttacgttctaagttgctaataatttgatgtaatctcttttcatcaacacttgctgggagagtgaacatcatccgatgcactaaatccccctcttcaacgtctaaagagataacactagcaattgaggtatatttagtaatgatctttgcaatcgtctctaaatcgcctcgttcgtccccagaaatgacagtaatcacataactaccaacatttacgctccacgattgagataacccatccaagagacgtgcatgggttaaaattccatagaagtaattgttatcatctaatacagtaatgaaaggtaaatccttaattgagaagaagacgttaaagaaagcagcattaacattaatatacttagtggcattttttaaaagagaagtcacaggttcttgcattgatccaccgcgtgatttgtggcgataaatatgcattttgtaaatatttccacggaacaagcgacccgttttatctaaaactggaacgcaacggaatccagattcttcaagaatatcaagcgcttcttcaagagttgcatcttcacgaacagttgttaaatctttcttaggtttgaccattgattttaaaagcattagaatttcctcccaaaaccgcaattttctttaatacaaatttaataataacacaaaatgataatttagaacacgactaccggtgttccgagggctacttcagcataaacagttttcatcgttgcaggtggagtgttgacacaaccatgggaaccatgggttttataccaatctccaccaaatttaggttgccatgaagcatcatggagaccaactccagtataatcaattggcatccagtagctgactggtgaggcataattagagccatccgtatttttaccttttagggtagcattacgttttttattccaaacaaagaacacaccagttggagtgtcatcattatttgcaggcattccagtaacaacatcagttgaaattttaagcttgccgtctttgtaataccacatatgttggttagttttatcaacttcgacatacgttgatccgagttcaccttttttaagagattgtccagaacctgaaattgtagctttttcggtgaagtctttaccagttgcaattttttgggctatatcagctgcgtcggtggtagtatcaatggtccaaccaaaaatttcatttttaacagtttgagaaccacgtttagtactattaaaggtcacactagctccataggtagaatacttatcgtttaagtcatctagataggctttaacttgggcattatcaaccgaaacagtttgagtaccgtcgtttttagaagtaagaactatccactgctttaaagtatcacttggaatagtgacattggtaccgttgatgttataagtaattttttctgctgtatactttttaatttgtttttgaatatcatctgaattaacagtagctgattgatatgttttggttaaatcaatatctttttgtccttttgcgatgctggttttgatttcctctgcaagcgcagtagaactaattatcttattaccttttttagagcttgagctagccagttcagtggcactaatagcggaagctgaaccagtattacgattcttattcaaagtaatcgctgtttttttagcaaattcttctaatttagccttgctagttgcgtttactgtgttatcagcattagcggcatggacaagttgtaggggccacattaaagcattttgtttattgagaagcttagctatagtcttattatcagaagaggttaaacctgcatctgcatatttagcagttttgagaactttgtttttttcagttaaattaaaagtttggtttttaacatgattgttaaccagtgtttgtgcctgatttacatttttcccagcaacatttacgccatcaattacagtattaggcatgaatgtgttggaagtactgtagtggattgctcctcctgcataaattaagactagcacagcagcgactgcaccaagtattatgtaaggaagtttccttgtttttttaagatgatttgatctacgttgcatcgtgagcctccgaaataaattttatcctctgtaacattactgtaataaagaatattaatcaagcctatttatatatttttatttagtaaatagaaaaatacaggtcaacatggagtggttgatttttaatgacgagagaatatatagaaaaattaaataactaaaacattaaaagtgtttgctatcttcaaaatatttaatcagttattattatctagtaattaattgcatacggtaaatattacttacctattatatcagaagaaatgctatctttttatgaagaagtaatgttagaagcgtgaaattagtaaattgggcataaaaaaacgactctgaatatttattcagagtcgttttttcaactatttgaaattagttgatgttgaaaagcttatttttcttcaagagctttcaaaccatctgtaagaacttttttcaatgttgtagctgaatctgtcatcttcttcatttcgtcatcactaagtggtgattcgataacacggttcaaaccttggccgttaataacagcaggtgtaccgatgtagatgtcattcaaaccatattcgccgtccatgtaagcaccaacaggcaatacagcattttcgtcacgcaagatagcttttgaaatacgcatcaaagcagtaccaacaccgtagaatgtagcacccttcttgttgatgatttcgtaagctttgttacgaacactgtcttcgatttcagctaattcgtcagttgaaacgccttcttctttagcgatatcaagcaatggctttgtaccgattgaagcagttgagtaagcagcgaattcactgtcaccatgttcacccatgatgtatgcatcaactgagtcagggctaacgttgaatttcttaccaagagcaacacgtagacgtgctgaatcaagagaaatacctgaaccgataaccttttctttagggaatcctgagaatttccatgttgcgtaagtaaggatatcaactgggttagcagcaactaagaagataccgtcgaagcctgagtcaacaactggcttaacgattgttgaaagaatgtttaagttcttgttaacaaggtcaagacgtgtttcacctggtttttgtggagcaccagcagtgataactacaagatctgcatctttacagtcagaatattcacctgagtaaatgttcttaggtgcagtaaatggagtagcatcttcaagatcaagtgcgtcaccaacagtacggtccttaacaacatcaacgattacgaattcttctgcaattccttgttgtgccattgcaaaggcataacttgaacctacagcgccgtcgccgactaatacaactttttgatggttttgaattttagacaaaagatcaatccccttttttcatataatatttgaatttatcaaacaatactaagtatagcattttcataaaagaaagttgagtaaaaattttatgaagttcgggtatagttagtaaagtgattgataagttagaggttaaaagacccgcttggggtcaataatatggtaatattacatgaaaataaacgtggacagctgaggggttcttgctctttcagccgtttttgcgtgttgagggtggaaaaataacatgaaaatgattgtgggtttaggaaatattggtaaagaatatgataaaacgcgccataatactggttttatggttgtcgatgaattagcaaaaaagcatgatataaataattttaaagttcaaagtgatgccttgatcgcagattttcgagtaaatggtgaaaaagttttgttagtaaaaccaactacttatatgaacgattctggtcgagcagtgcgtcctttaatggattactacgatgttgatttaaatgacatgattgtggcctacgatgacatggatatgccggttggtaaaattcgacttcgtcaaaagggctcagccgggggacataatgggattaaaagcataatagcccatgtaggaacccaatcctttaatcgagtgagagtagggattgatcatccgactaaagaaagcgtcgtggattacgtactaggtaagtttaggaaggaacagataaccgattttgaaattggtgttcaaaatgcagtagcagcattagaagattggactacaattgaaaatttcagtcagctaatgaataaatacaactaggattatttaggagcaagtatgaatataaatgaaatttttgcatctgattcgggagttacaaccgttgttgatgctctccaaaaagggtcgcggcaattagttactggtttactagagccggctaagcaactttttttaagtacgattattgaaactaaatcagccccaattttatatgtaacagatagcttagcgcgggccgaacatgtctataacttgtttaaagaagaacagtccgagattgatacgtactggtttccagctgaagagattattgcggccgaggtggccactagttcgccaaattatcgtacggcacgaatccaatttttaagtgctttagcgacatcaaagacaggtatttttattacttccacatctggattacgccgattagttcccgaacctaaggatgttattgaagctcgaatcactctggaagtgggggttgaatatgagttccaaactttaattagcgatctgaatgcgctgggataccaacgggttgaacaggtggaaaagaaaggcgaatttgcggttcgaggttcggtagttgatatttttccacttaatcaagatgacccaatccgaatggatttttttgatatcgaaatcgattcgctgcgaacttttgatcaagcaacccagcgaagtattgaaaatatcgaaaaaattgaagtattgcccgctacagacttgataataaatgaaacaaaattaaaccaagcaattaaaacgatgaataacgagctggcgcaagctcaaaaaaaattaagcgaagaaaactttgaggctttacaacaaaatattaatgaagtaatcgagcgctggaaacaccaccaactgattcaagaagatacaatgtacgctaaacaattgtatgcagctaaaacttcattgctagattatctaacaaagggcacgctagttttagacgactatccccggatcttggatgctgaaactgacattgaaaataatgaagccagttggatcgttgatcagttaaaaaataacgtgttgttagataacgaatcctttggcgtcgatattcgaacattgatcaagaaaaagtctgttcctcagttatttttgtcgatgttccaaaaagggatggggcgcttaaagtttgaccagttgacggaaatcactactagggctgtccaagatttctttggacaaatgcctgttttaaaaggtgaggtggaacgatggttagctcgtaagcaaacggtgttaatctttgccaattccaaagaacgacaaggaaaaattaccgaagtgcttcacgattttgagattgctgctcaaaaagttaatgctgatagaattcaaatggcagcggttaacattattggacaatcatttccacaaggctttgatatgcctagtacgaaattggtagtgttaacggagaaagagctatttgctaaggttcctaaaaaacgtcctcgccaacaacatgtggaaaatgccgaacgtctcaaaagctatacagaactaaaaactggggactacgttgttcatgtcaatcacgggattggaaagtttatgggaatgaccacgatggaagtcgatggcgttcatcaagattatatgaccatccagtacaaagggagtggtcaattatttattccggtaacacagttaaatcttgtacaaaaatacgttgcagcggaaggtaaaagccctaaattaaataaactgggtggctctgactgggctaagacgaagaagaacgttgcttctaagattgaagacattgccgatgacttaattgaactgtatgccaaaagggaagctgaaaaagggtttgcttttaaaccagatgacagctatcaacgtcaatttgataatgattttccatatactgaaactccagatcaattacggtccattgaagaaatcaagaaagatatggaaagagaacgcccgatggatcgtttgctagtaggagatgttggctacggtaaaacagaagttgcgttacgggccgcctttaaagcggttgaaagtggtaaacaagtggctattttagttcccaccactattctggcgcaacagcattttgatacgatgaatgaacggtttgaaggatacccaattgcaacgggaatattgtctcgtttccaaactggggcacaagttaaggaaacccttgagggattaaaagatggcagtgtagacgtgattgttggaacccatcgactattatctaaggatgttgaatttaaagatttaggattactggtaattgatgaggaacaacgttttggggttaaacataaggaacgaattaaagagcttaaatcacaggtggatgttttaaccttgaccgcgacccccattcctcggacattgaacatgtccatgattggggtgcgagatttgtcagtgattgaaacaccgccaactaatcgttatccgattcaaacgtatgtaatggaagaaaacgcgggggctattcgtgaaggaattatgcgagaaatgcgccgtaatggacaggttttctaccttcataatcgagttcaagatattgaaaaagtagtggctgaaattgaagcattagttccagaagcccgagtgggttatattcatggacaaatgaccgagaaacaattagaagatatcttgtttgaatttattgcgggtgagtacgatgtgttagttacaacgacaatcattgaaaccggaattgatattccgaatgctaacactctttttgtggaaaatgccgatcatatgggactttcccaattatatcaacttcgtggtcgaattgggcgttcatcacgggtggcttacgcgtatttcttgtatcagaaaaaccgagtgttaactgaattaggcgaaaaacgattggaagccatcaaagatttcacagaactaggttctggatttaaaattgctatgcgagatttatcaattcgaggcgcgggaaatctgttaggaaaacaacaacatggctttatcgattctgttggatatgatttatactcacaaatgctggcagatgcggttaagaagaagcaaggtaaaaaggttaaacggcgttcagatagtgagattagtctcggaatcgaaggttttcttcctagttcttatattgaagatgaacagcagaaaatcgaattctataaacgattacgtcaggctaacagtcatgaagaagttgttgatattcaagatgatatgttagaccgctttggagattatccagctgaagttgataatttattacaaattaccgacttgaaaattatagccgatcaagttcaagtcgaaagaatcacccgcaaggacggtattttaactgtaactatgacaagggcagccagccaaaaattaactggtgagcagatatttgaagcattatcagttacaagactaagagcgacggtagcggaatcagatgctaaaatgcatattaagctggtaattcaaccacgaatgacacaaaaggattggtttacacagctgtttaattatattgagaaacttaaagaatatgtgtgaggactgattgtgaaaaattcgagtgctaaaaaggttatgcgtggggcattaattttatccatcgcatcaattgtggctaaaattttaagtgcagtctatcgagtgccacttcaaaatttagttggtaatactggtttttatgtataccaacaaatctatccaatttatggcattggaatgacctttgcattaaatggatttccgatttttatatcaaaaattattgctgaggaacccgaagaagaaaaaaggttacgtttaagtcgatatgcgatgctaattttggcagggctatcattgttaatatttttatttttaatggtaggtgctaggtggattgctggtgcaatgggggatgttagtttaaccccactattgcgaatggtttcgactatgttcttgtttatgccattattggcgacggggcggggttactaccaaggaacttatgatgtggcgccgacggctaaatcacaagtgcttgaacaagtagtgcgggtttcaatcattattttagttgcggtattggcggttaaactaaattggtccgtgtataaaatggggacttgggcgatggctagttcaactttagctgccgttgcttcaacgctcttttttataaagtttgggtccaagttaataaaagctaaacgacataaatttaattggcaactgtttaaaattttagtgaaacgctttgtggttgaaggtggcgtaatttgcttattggcagccatgattattttgctacagttagtagattcgttcacggttaaaaatagtttggtcagtggtgggctaactcaatcaatggctaagtcgatgaaggggatttatgatcgtgcacagccgttagttcaattagggacggtgattgctacggcttttgccaccacgttgctaccatctcttacggaggctttacaaaaaagggacacaaaagccttttatcgatcagcaacctcactattgcgggtttcactaaccatatcgatggctgccagtataggaatggtggctttaatgcctcaaatcaataacctgctatttggcagttcggaaggttccttagctctagctgtgtacaatttaagtgtgatttttgctgcattaatctttgtgtataacagcatcttgcaaagtgcgggggctgttaaaccgaccttggtggccattatcacaggaattataattaaagttgttttaaatagttgggctactcaatggttgggaatcttaggagctagtctcgtgacagtattaagcttagctgtgattgcaggtgtgatgaattatgcattaccgagtcagttgtcgaaacgggtttaccgagaacatcactttttaaggaaactcatctggggaaatttgttaatgttcatagtagtaaaattactcgtgattgttttacaattaacagtagtttctccaggacgcttcggcgctactattatcacagtaatgggtgtaatcgttggagcaggtgtttttattagttatatctttaaattcaggttatttagtattcgggaatggttgactattccctatggttcaaaaattttaagaatggtacagaggattgttaaatgagattagataaatttttaaaggtttcaagaattatcaaacggcgtgctttagctaaggaagtagctgatcaaggacgaattttgatcaatgataaagtggctaaatcttcaactaatgtgggggtaaacgaccatattgaaattcgttttggaaataaaacgttggtaattaaagttgatcagcttttagatactacgaaaaaagatgatgcagaacggatgtacacgatcgtttccgaaaattacgaacaagattttagaaaataattaagaagttaaaaatgatagacagttaaagaaagcgttgttataatttaagataattgagaggttattttaatggaaaatgtgaagaaaaataagagaagtatgaaagcaagaacagcgacaggagcagtaaatccctatgctagggcccgtaaacaacgagcactatttattttaggtgttttcgcgattattgcgaccatttttatttttcaaattgtccatgcacatatttccagaagtagcgttaataataaattagcaatggaaacagcgcattatgagaagattcaaaatgataacaaggcgctcaaagtcaaagttaagcagatgaacgatgaacaatatttggaaaaattgattcgttctaaatatctctatactaaaaaaggtgaaactgtctataatttgccaaatgatgcaaaataaaattagattaaagcattgaaatgacgtaggtcatcttaatgctttttttgttaattaatggactgaatttgcgtgaacaaaactcgcaaggagtcggtgtggaatggtataattaagcattaaattttttaggaggatcataggtatttatgacaatcgaagttggaactaaggtagacggaaaagtttcaggaattacaaatttcggagcttttattgatttgggggagaatcgttcgggcttagtccatattagtgaagtttctgacggttttattaaggatattcatgacgtacttaatgttggagacaccgtgaaggttaaggttttatcgattgcggacgatggaaagattgctctttcaattagaaaggcagttgatcatcccgtacaaaaagaaactgctaaagttgcttcaacttcccaccactccaatggaaatttccatggccgtccagcaggaaacatggatagaaagtattcacataatcaacacagtcatcgcgataatcatcgtgaacaacgcagctcaaatgtggaaccagattttgatcaaatgctctctggatttttaaaggatagtgagtcacgcttatcaacgttaaaacgtaatacggatggtaaacgtggtggtcgtggcggacgccgtagttaactatgaaaatcggtgagctaggtgatcagattgttgaacaatatggactgagccaattcaaaatcgtagtggcagtttcaacgggagtcgattcaacggtgctaattaacgcattgataaattcaactaaaattaagcatcaacaattgattgttgcccatgtcaatcatcagctgcgtgagcaaagtattgaagaagaacgatttttacataaatggtgtcgacagcatcaaatcacgtttatggagacggactggcctaaaagtcagcaccctcaacatggagtagaagctgctgcacgcgaatttagatatactttttttaagcaggtaatgcatgaccagcaggcgcaagtactattgaccgcacataatgcggatgagcaagctgaaaatttcgtaatgcaagtgattcgggggggctggctaaatcaattaaatggaattccagaacggcgaacgtttgcacaaggatggctaattcgcccgtttctaaagctaaccaagcaatttttgattgagaccgctcaagaaaataaattacggtggtttgaagatcaaaccaaccgtactactgaatttttacgtaaccgtgtgcgaaatgaaatcattcctgcttttcgaaaagaaaatccaagggtggttgaacatatccagcactatcaagatcagctattagaacagtctaacttagtcgaccaagtggttcttgaaaaacttactaagttacaaagagatgaaagctttgatctgctggcgctacgtaaagaatcgctcccatggcagaaaaaaattattttaaaaattattactgaagttaatgcggaaattgcaataaatgagaataagttggatgagctagttcgattggttaataatactaaacaagctcaagctacaatcgacattggaaaaaactataaatttgaaatcacgtacaattatctacgaattggtaaaaaaataaccgtaaaaggtgaacaagtaaaaaagcgtgtggtaacattgaattcgtggttaaatttagatggtgatgctcaattccaattatctaatcaaaagtcggctttggatgctgacgagacgatggttttgagcgccaatcagctgaggttcccgctttttatccggaaaataaaccccaacgaccgcttaagacttaaaaatggtggttataaaacaattcgtcgagagttaattgatcaaaaggttccgaatgaacaacgagaacgttattttgcaattacggatgttgatgatgaaattttatgggtaccaggtttgcgaaaggcctggttaaaggaacctttcctaaaagataatcaacaatttattatggaatttagaattggaggaagtccccatggacaatgatatcgccagagttttgtacagtaaggcggatataaaggaagcttgcgaacgtttaggtaaacaattaacaaaggactatgcaggaaaacgtcctttaatcttaagtgtattaacgggtgctatgttcttcacaacggatgtcgttcgtgaatttgatgtatattctgaaattgattttatcgatgtttcaagttacaaaggtggcatggcatcaacgggaactgttgatttggtgtcagatttatctgaagatgttaatggacgcgatgttttaattattgaagatatcgttgatactgggcggacattaagttatattgtggatttattatattcacgcaatgcgaaaagcgttaagatttgtaccttcttagacaagccagctggacgtgttgtagaagctaaagctgactacgttggttttaccgtacctaaagagtttgtagtgggttatggattagactatcaaggctattaccgaaacttaccttatgtgggagttttgaagccagaagtttacgaataaaatcattggtcaaagttagtcaaatatggtattatatcgtcaatggtcaagattgtaactgatatttcttgatgccttacaaggaggaactacatgaaaaataacagaaatggcctgtttaaaaatagtcttttctatatcgtagtttttttgagtattatgggaattatcgcggctgtagttggaaagggtggcaatagccaaacttctactatttcgtctagcgaatttgtctcacaacttaaaaaagacaacgtgaagagctttgatattcagccagccaatggagtttataaggttacaggtaaatatcgttctgcacaaaaggatgattcttcagcaggattattcccaggaaccgtttcatctaataaggtgactggattccaaacttcagttctacagaatgattcaacaattaccgaaataactaaatctgcttcagctgatggagttaaggtcacaactaaagaagaagaatcaagcagtttctgggttcaattactagtaacgggcttacctttaattttctttatctttatcttctacatgatgatgggtcaagccggtcaaggtggcggaggtaaaggggtgatgaactttggtaaatccaaggtcaaacctgctgataagagtgcaaataaagttcgcttctctgacgttgcgggtgaagaagaagagaaacaagaacttgttgaagttgttgaattcttgaaagatccacgtaagtttgttcagttgggagctcgaatcccagcgggggtacttttggaaggacctcccggaactggtaagactttacttgcaaaagcggtagccggtgaagccggagttccgttctattcaatttctggttcggatttcgtggaaatgtttgttggggttggtgcaagtcgtgtacgtgacttgtttgaccaagctaagaaaaatgctccatcaatcatcttcattgatgaaattgatgctgtaggtcgtcgccgtggcaatggtaccggcggaggacatgatgaacgagaacaaactttaaaccaattattggttgaaatggatgggttcacgggaaatgaaggagtcattgttatggctgctactaaccgttcggatgttttagacccagctttactacgtccgggacgttttgaccgtaagatcttagttggtcgtccagatgttaatggacgtgaagcaattttgaaagttcatgccaagaataagccaattgatagtgatgttgatttagcagaaattgctaaacaaacaccaggttttgttggagctgatttggaaaacttacttaatgaagctgctttgttagctgcccgtcgtaataagaagacgattgatgctgctgacttagacgaagctgaagaccgagtaattgcaggaccagcgaagaagaacgcagtggttagcaagaaggaacgtcagacagttgctttccacgaggctggacatacaattgtcggtttggtattaaacgatgcacgggttgttcacaaggttacaattgttcctcgtggacgtgccggcggttatgccatcatgcttcctcgtgaagatcaaatgttaatgtcgaagaaagatgctatggaacaaattgctggtttaatgggtggtcgtgctgcagaagagatcatctttgaccaacaatcatctggagcatcaaatgactttgagcaagctactcaaattgctcgagcaatggttactcagtatgggatgagcgaaaaaattggtcaagtcgagttggctgctccggggcaatcctactatggtgaaggtggaccagcttattctgaaaagacagctgcgacaattgacgaagaaattcggcgctttactactgaaggttataacgaagctcgtaagattattgaagagcatcgtgaacaacataagattattgcggaagcattgcttgaacatgaaacacttgatgaaaagcaaattattagtttattcaagacaggcaagatgcctgaaaagaaaactacttctgaatttccgagcgaaaaagctgcaacgttcgaagaatctaaacgagaactagaacgtaaagaagctgaacgccatgatgaagctgctaaggcagttaagcatgacggctcagaaagtgattctgctacgactgtttattatccaaaagacgataacaatcattcagaaaatcaataatttaagaatcgtgggttgcaaaatgcactcacgattttttgatgaaagcgggtataaaatgaaagattatttagttaaaagtattgtaaatgatggaatgtttcgagcctacgcggttagtaccactaatttagtgcaagaagcacaacaacgtcatgattcttggagtgccgcaactgctgcattgggacgttctttaacggcaacactgttattatcatcgtcggttttaaagggcgaagaaaaattaactgtcaaaattaatggtggcggccctaccggaacgattgtgattgatggaaatgcgaacggaacggtcaagggctaccttcagaattcccatgtttcattacctttaaaagaagatcatcatattgatgtggggcaagcagttgggaatgctggggtaatggctgttaccaaagatatgggtctaggagatccatttactggacaagttggcttagtttctggagaagttggggacgattttacgtattatttagcccaatctgaacaaatcccttctgccgtcggcgtatcagtatttgttaatcctgacgaaacggtgggggtggcaggtggcttcttgattcaagttatgccagatgctacagatgatgctattgataaacttcaacaacgtttgaaagaaattccactagtttcagaaatgttacgtgctggtaaaacaccagaggaaattttaaaagatattttcaatgatgatgagattaaatttttagacaagatggatgttaaatttgaatgtgattgttctaaagaacgttttggcgattcaatttcagcattaccattacaagatatcaaagaaatgatggaagaagatcatggtgctgaggcggtttgtcgtttctgcggtaataagtatgtattttcggaagcggatctccaagaaatcattgaccaaaaataagtgaaattggtaagcttctccacaatcatgaatttctgtgatattatattctgcatgcataaaaagtttgacgaggtgaaaaaatggaatggaaaattggggacattacaatcccaaatcaactagttgttgctccaatggccggtgtgactaatactgcttttcgaatgatctgtaaaaaattcggtgcgggattagtggtttgcgaaatgatatccgaccgaggaattatctatggaaacaaaaaaactctgagcatgatgacagttgatccaaatgaacatccaatgagtattcaaatttttggtggcactaaagaaacattagtagaagctgctaaatttgttgatcaaaatactgatgcagatattattgacatcaatatgggatgtcccgtaaacaaagttgttaatactgatgctggtgcccgttggttgctggatcctaataaggtatatgagatggtatcttacgtgacggatgcggttaaaaaaccagtaacagttaaaatgcgaactggttgggatgctaaccatattttagcggttgaaaatgcattagcagccgaacgtgcgggtgcttctgcgcttgctatgcacggtcgaactcgtaaacaaatgtatactggacaatcagattggaatattttaaaagaagttggaagtcagttgcatattccatttatgggtaatggagatgtacggacacctgaagatgccaaaagaatgttggatgaagttggtgcggacgcggtaatgattggccgtgctgtactgggtaatccatgggaattacaacgaatttcagcttatttaaatgatggaacagttattgatgaacctacaccaagagaaaaaattgagattgcaaaagagcatttacacgctctagtagaattgaagggtgaaaatgtcggtccgcgagaattccgtggacaagctgcctactacctcaagggtattccacattcagctcgaaccaaggtggctgtaacgggagcagatactgagcaacaaatgattgatatttttgatagttttattgaaaaactcgaaactagaagagtaagaactttgaattaaggttgcaatttgttgttttagtaggtaataattatatttgaataaatttaagagggggacaaaatagtgggtgaaaagcaacaaccaagtatgaatgaccaactaagagttcgtcgcgaaaagatgcaagaacttcgtgataagggcatcgatccatttggtcatcgttttgagagaacacatttagcagcacaattacacgaaaagtacagtgatatgacaaaggaagagcttgatgaacagggcgtggtagctacgattgccggccgtatgatctctaagcgtggtaagggtaaggtcggttttgcagatcttaaagaccgttctggaaaaatgcaattgtacgttcgtaaggatgttttaggcgaagatgtatacaaagtctttaagcgttctgatattggtgatttcctcggtgtaactggggatgtcatgaaaaccgatatgggtgaattaacaattaaagtaacgggactaactttcttaagtaaagcgctccgtcctcttcccgacaagttccatggtttacaaaacgttgaacaaatttatcgtcaacgttatcttgatttaattgctaatgatgatagtatggatcgtttcagaaaacggactaagattgtttcagcagtaagaagatatcttgatggtaatgattttgccgaagttgaaacaccagtgctacatactcaagctggtggagctagtgcacgtccatttattacacaccataatgccctagatatcaatttatatttacggattgcgttggaacttcatttaaaacggctaattgtcggtggaatggaacgagtatacgaaatcggtcgcgtattcagaaatgaagggattgatactcgtcataatcctgaattcactatgctcgaaacatacgcagcttactttgatttccatgacgtaatggatgaaactgaaggaatttttaaggcagcagttgcagcggtttcagatgatggtaagattacgtaccaaggaacagaacttgacttaggtcaagattttgaacgtctacacatggtcgatgcaatcaagaaatatgcgggagtggacttttggcctaagatgtcggtcgaagatgcgaagaaacttgctgatgaaaatggtatccactacgagtcttggtggacagttggacacatcatcaatgaattctttgaagaaaaggttcaagaccaattgaaacaaccggtgtttatttacggacatccagtagaaatttctccactagctaagaagaacgccgaagatgatcgttttacagatcgatttgagttgtacatcttaggtaatgaatatggcaatgcctttactgaattaaatgatcctatcgaccaacgggcgcgttttgaagctcaagttgcagaacgtgaagcaggtaacgatgaagctgaaggtattgacgaagattatatcgaagcacttgaatatggtatgccaccaacagggggacttggaattgggattgatcgtttagtgatgttactaactgatgctccttcaattcgtgatgtactattgttcccaacgatgaaacccatcgactaaataagaactaagaaaagaatgagaatagcaaaattctcattcttttttttgtgcattttgcgcaaggaaaaagatgtttttttagcttcatgaaatcgttaacaaatcaatttctaatcctttactaagtaattattacttttttaaaataaactattgacgaatcacgggtaaaattggtattatattctagcagcgttagttcgcggcagtcaccgaattagatttatgaaaaattgctaaaaaattgcaactgcagtagccaattcagctttaggatataagtttgcgttggatgctattttgaaattagatgtagaagagtctaaagattggtcgattagtttaaacgatgaagaaatcgatagtattttagataatttaactagtgatctggatgcggaacgcatcgaaatcattgagatattgagagatttatacagtcatattgctttaaatgaaattgtacccaacggacaatccttgtctaaatccatgatggataaatacgataagcatcatgcggatttagatgtattgaaaaaagttatttctaatatggacgatcgaaaaaaagctaaatctttaaaaaatatttacaatcagtatgtgggtaaaactaatgataaagttttggataaagatgaattctataaacaaatccaaaagaatttagataagtctgaagatgctatgaagattgtcaatgaaattgaacttgatcaatttatgccaaaacagcgtacatctcaaaatggagtgattccgcaccaacttcatcaaaaagaattagatgaaatcattgaaaatcaaaagcaatattatccatttttagcagagcctaaccctaacgaaaaaagaaaacctcatgctcaatttaaattagatgagttgatagctttcaaaattccttactatgttggtcctttgattacaaaagaagaacaacaagctcaatctggtgctaaatttgcctgaatgaagcgtaagcaagatggggtaataactccttggaatttcgatgaaaaagttgatcgaatggcgtcagctaatgaatttattcgccgaatgacgactaaagacacgtatttgttaggtgaagatgtacttccagacgaaagcttaatctatcaaaaatttaaagttttgaatgaattgaataatgtcaaagttaacgataagaaactgacagttgctgataagcaggatattttcaatgatctgtttaagaaacagaaaactgtttccgtaagtaaacttcaaaagtactttgttacaaaaaagcattacttgacagagccaacgatcaagggattatcagatacgaagaatttttctaatagcttatcaacttatattgattttgaaaaaatatttggaaatgaaattcttgctgatcaaaataagcaaaatgatttagaaaaaattattgagtggtcaactatttttgaagatcgtaaaatttttgaagataaattgcatgagattgaatggttaactgaaaagcagattaaagctattcggagatatcgtggatggggacggctttctaaaaagctactagtcgatttaagaaataatgaaggtaaaagcattttagatgaactttggcgtaccaatgataactttatgcagattcaagcacgtgaggaatttgctaagtcgattgtcgaagctaaccaaaagttaatgaatcttggtggagctgccagtgttcaaaatactgtggaaagtaccttagaggatgcctatacctcaccccaaaataaaaaggctattcgtcaagttattaaagttgttgaagacatagtcaaagcggttggctacgctccagagaaaatcacgattgaatttactcgaggggcagataaaaatcctagacggactcaaaatcgtcaaaagcaaatcatggaagtatataaaactgcggctaaggaaatcgtagatgcaactttgaagggacaacttgaaaatgaggaaaagttaactgataagttatatttgtatttcacccagttaggtaaagatatttatagtggcgaaacaattaatatcgatcaacttaataattatgatattgaccatattttgccacaagcttttattaaagatgattctctggataatcgagtgttaacgagtcgggctttaaataacggtaaaagtgatagtgtgcctgtgaagcagtttggcgcaaacatgaaatcattttggatgagactccaagcacatggattaatctcaaaaagaaagcttgataatttaatgacagatccagacagtattggaaaatataccatgcaaggatttgttagaggacagctagttgaaactagccaagttattaagttgactgcaaatatactaggtgccatctacggggaaaatactgatattgtggaaatcccagcgaagctgactcatcaaatgcgggagaagttcaatctgtataaggtgcgtgaggtaaatgattatcatcacgcctttgatgcgtatttaacgacctttgttggtaactatttattcaaacgctatccaaaactacgtccttattttgtatatggcgatttcaaaatgactgataatgccttgaaagggatgcgtagattcaatttcttacatgacttaaaagatgatgaagtattagtagataacaaaactggtgaagttttatgggaaggtcaaaagtctattgaagagttgaagaagatttatggttataagtttatgttaacgactcatgaagcatatattaataatgggacaatgtatgatcaaacagtatatccagctaaatctaacaaaaaacttattccttcaaaaaacaatagaccaaccaatatttatggtggattcagtggaaacaaagatgcatatttagcaattgttaagattcttggtaagaagggtgatacctataaagttgtgggtgttccaagaagattttctgatgaattgttaaatgcttataatgatgactactcagaatatttaaataaattgcatgatgttttggtaacacaatttacaaaaaaacaaagaaataagaagactggtaagataattaaaaagattgagaattttgaaattgtagtgggtaaagtcaactatagacagagaattattgatagaaaccagagcttcatgctcggaagctcaacatacaagtataatactaagcagttagtgttgactgaaagctcaatgaagatattatctaactttaagcacgctagtgatgataatttgaatttagtttatgatgaaattttggaaaaagttaatgagtcatttgaattatacgataagaatgggtttagaaaaaaattaaataacaatattgataaatttagaaaattaccatgtaaatctatttttgaaaagaataaattaatttccgttggaaaatgtgaaattttattccaaatactaaatgggctacatgcgaatgcaacgatgggagatttaaaaggaatcggattttcaactccatttggttttatgcaagatgcaagcggaataaaattaaataaggattctatgctattgtatcagtccccaaccgggttatttgaacgcaaagttaaattgagcgacctttaaggaacgcaagaaaaagaggaatcaaccttaaaggtgattcctcttttattatgtaatgcccatataatgggacagatgtgtaaactccgcgtaaagcgttgtttgatttcaaaacagaatgttaaatcaataagtttaagtacgttgggagctacccaacaacataaatatatacttaaataaaaataaaatcaaggagaaatttatatgggatggcgatcaataattatcacacagcatgctaaactatcatattcttcaagaacaatgatagtccaaaccaatgatgggattaatcaaatccccatcgatgatatcagtctattacttatttcgaccacgcaagcagtcattacgacagctctaatcagtgaattatccaagaaaaatgtaaaaataattttcacagatgatactcacaaaccaattagtgaaacttatggatattatccaaatcatcgaagtgcagggctattaagagaacaacttaattgggaaattggtcgttcccaagtgttgtggacaaaagtggtagctagtaagttgatcaaccaaattaatgttcttaaattacagaatgttaaaactagtagtctagaggatgaattaaacaagttggaattaaatgatattactaatagagaggcagttattgccagaaagtattttcctttgctttttgaagatggattttccagaaggaatggaagtgtaataaatacggctttaaattatggttattctattttattatccacaattaatcaggaaatcgtttctaatgggtacctgacatatatcggaattcatcatgacaatgaggaaaatcaatttaatttagcgtcggatttaatggagccatttcgtcctatcgtggatttttggctagctaataaaaagtttaacgagtttaccccagatgtgaaatatgggctagttgaattactgagcttggaaattaaatataatggcaaaaacacgttattgcgaaatgcgattacgatccatgttagaaactgtttgaaatacctatcaaataaagaacaaaatataaaaattgaaatggagttattagatgaggtaccaaatcatgcgattaatgataatgtttgatctaccagttgaaacggctaaacaacgaaagcaatatcgtcaatttcggaaatcattaattaatgaaggatttttaatgattcaatactcagtttatgtgagagtttgcgtaactaagaaatcagccacattgatggaaaatcggataaagaattttttaccagaaaatggaacgattcaagctcttaccttaactgaaaaacagtataacgatatgcatttcttagttggagatagagtagaagatgttcgaaataattcagatcggacggtaattttatgaaaattacatataaaactcatgataatttagaaattaattctggacagatatcaattttaggaactaatagtccaacggtctatactgatataatacaaggattacaggacgaaaacgaaaaaatcagcatagtcgatgaaaattatagtgcattggaaatagcgcacgcaatcgattggatcggagatgttggtactcagaatttagttttaacaaaatatttgcgccaaattgaaaagttatttttacggtctgttacagatgaacagcaaaataaaattcatgatgaaatcaatcgtatatttaacatagtttccgaacaattatttttactagatttaccgatagaagttaactttgattttgatcttaaaaagttatttaaatattgcgggattcgatttgatccaattttaattagtaaaccatatggtataattgaaacaataattaaaattcatgaaactagtaatcttgactcgtgtatagcgttaactaatgtagctcattatttaacgccagtcgaatttgaagaacttagccagttagtcaaagagacgaatcaaaaaatactactaatcgaattcacagaaatagaagagcagagcttctatggaaacgctgaattctactacattgatactgattttattgattggcacaactgaaaccattatttttttatgagaaattaatggtttcagaagagtgttaaatcaataagttcaagtactatcgtctgagtgatcatcttgtaatttaagtttcagaagagtgttaaatcaataagttcaagtacacctagaaggcgaattagcaaacattcaaggtttcagaagagtgttaaatcaataagttcaagtacgtggtgacacaccggtaacaaagaagttcagtttcagaagaatgttaaatcaataagttcaagtactgctacattctatggccaagatgtgtcgttgtttcagaagaatgttaaatcaataagttcaagtactaaatttcgccattaagcttcctccagttcgtttcagaagaatgttaaatcaataagctcaagtacttctgccggcggaatccactaaatttgtttgtttcagaagaatgttaaatcaataagttcaagtacttattaaaaagtgccttatctcctgtcactgtttcagaagaatgttaaatcaataagttcaagtactttgacccagtcgttgcttgaaccatctgagtttcagaagaacgttaaatcaataagttcaagtaccgcgcgccgttatatctgaattttctatcagtttcagaagaatgttaaatcaataagttcaagtacttaaaaactaaaacgtctaatgataatctggtttcagaagagtgttaaatcaataagtctaaaattacaaactgtacctccgcaacaacttagccagctgttgtaattttccacaactagttcgacagtccaaaataacaaattaaaaagaatcattttagccactaatacttagtgaaactaaaatgattctttttgttatttaattactaacggtaaaataacgaccgaattcattaaaatatgagcaatcatcgaagtttgaatacggccggtctttttgtacaaccagcagaatagcaaaccaatggccgcatatagaaagatgtgactatcgttgtgcataaatgcaaaggctagactagaaatgatggccatgacggtgaatcctagtgtggaattagctccaaacatcgcactgagattaccaaataaaacttttctaaaaaccaactcttccatgattggagctcccacggtgatcgctaaaatgaaaaatggattggttttagccaaagtcaccaaggttgcggtgttttgagaagtaggattacttccaaaaataatcgtaatatagctaatcacaaattgcagcaaaattactaaggctgttccaatgattccccaagcaatagcatatagaaaagatttacgattagattcgatatggttgatttcattggttttactactaataaagattagtagcagtgcgccaatcaagtagtcgacagtttcaacccagataaatccagcccccagattaataaacacgtttaaaatgccaggtagaaggaaaattattaaatacgtaattaaagttaaaattgaactcttagaaattttcatctcaaccctcctttattcctgatagtatagcatatttaaagcattgctaaatttgattggttaataaaggtcaaaaatacttgcaatctaaaaaaatcatgatatagttatcattgtagttagcacttagagatgacgagtgctaaacaaatcttatcagtaaattatatttggagggattcacgtgttaaaacctttaggagatcgcgttattttagaagctaaagatgaagaagaacaaactgtcggaggcatcgtacttgcaagcaatgctaaagaaaagtcccaaactggaaagattatcgctgtcggtaacggtacagttttagacaatggtcaaacagtaccaatgaacgtcaaagttggcgatacagtagtatatgacaaatatgctggtactgaagtttcatacgaagataaaaaatacttagttgtccatgaaaaggacttagttgcagtagttgaataattaatttttaatttaggagtgttgataatggctaaagaaattaaattttcagaagatgcacgtacaaaaatgcttaagggtgtagataagttagctgacaccgttaagtcaacaatcggacctaaaggccgtaatgtggtcttggaacaatcatacggttcacctacaattactaatgatggtgtgacaattgctaaggcaatcgaacttgaagatcattttgaaaatatgggtgctaagttagtttcggaagttgcttcaaagaccaacgacattgctggtgatggtacaactaccgctacggttcttactcaagcaatcgtcaatgaaggaatgaagaacgttactgctggtgctaaccctgttggtatccgtcgcggtattgaaaaagcaacaagtaaagcagttgaagctctccacaagatgtcacatgaagtaaagactaaagatgatattgctcaaatcgcttcaatttcttctgctaacccagaagttggcaagttgattgctaacgctatggaaaaagttggtaacgatggtgttatcaccattgaagaatctcgtggagttgacacaacattggatgttgtggaaggtatgcaatttgaccgtggatacatgtcacaatacatggtaactgacaacgacaagatggaagctaaccttgataatccatacatcttaatcactgataagaagatcggtaatatccaagatattcttccagttcttcaatcagtagttgaacaaagccgttcattgttgattattgcggacgacattacaggtgaagcactaccaacacttgttttgaataagatgcgtggaaccttcaacgtagttgcagttaaggctcctggctttggtgatcgtcgtaaggaacaattggaagacattgctatcctaactggtggtactgtaattacagatgaccttggtttgaacttgaaggacgttactatcgaacaacttggtcaatctaacaaggttacagttactaaagatgatacaaccatcgttgaaggtgccggaagccaagaacaaatcgctgaacgtgttggaattatcaaacaacaaatcagtgaaacaacttctgacttcgacaaggaaaaacttcaagaacgtcttgctaagttatctggtggtgttgcagtaatccgtgttggtgctgctactgaaacagaacttaaagaaaagaaataccgtatcgaagatgctttaaatgctactagagctgccgttgaagaaggttttgttcctggtggtgggacagcacttgctaacgttatttcagaccttgaagacgtcgaagctgaaggcgatgaagctacaggtgttaacattgtacgtcgtgcgcttgaagaaccagttcgtcaaattgctgaaaatgccggcgaagagggttcagtaatcgttacaaaacttaagggtcaaaagccaggtgttggatacaacgccgctaacgacgaatgggtcgacatggttgaagccggaatcgttgatcctacaaaggttacacgttcagcacttcaaaatgctgctagtgtatcagcattattgttaactactgaagcagtagttgctgacttaccagaagacaacccagctcctgcagcaccagctccaggtatgggcggtatgatgtaatttaattcttagaactaacgatttaaattaggaagatgcgaaggtttgccgaaaattcagctctccaacgctaaactagactaatttaaattaaaagaatccatgatgcgatcagcattgtggattcttttttatttccaactaggagaatatgaattagaataacttagaagttgaaaaacttctttactggactgaggaatattacgtttaaattacaccttattcagatgaattctgttattatcagtatatgaattataatcttaaaaattgtgctagtcattttgcgagatttggagtagaatttcacttgcatatttttgaaaatggagagtaaaagatgttttcatatttgaagcgtattttaattggtaaaccactgaaaacgctcgacgagagtggacaagctttaacaaagttcaaagccctcgccttgctatcttcagatgctttatcatctattgcatatggtaccgaagaaattttgtcggttttgattgttttatctgccgctgcaacttggtattcaattccaattgctgggattgtattagtgctattattcgcgattaccgtgtcataccgccaaattattaaggcttatccatctggtggtggggcgtatgtagtagctagtaaaaattgggggacgtctgccggtctggtggccggtggctcacttttagtggattacatgctgaccgtagcggttagtgtgacctctggtacagaagcgattacgtcagcgattccagcattgcaaaagtaccatattgccattgcggttttgattgtactggggattatggcgctgaatttgcggggactacgagaatcagctagtttcttaacgattccggtttacctatttatcgtggttatttccttgatgattgtggttggtttatacaacattgcaactggtcaagtggcttatcatgcggcttccgcagtgggatcggcagtgcccgggatgacttttgtgattttccttagagcactatcgtctggttcttcttctctgactggggttgaagcgattagtaatgctgttcctaactttaagaaaccacgtcgtaagaatgctgcaggaaccttagccattatgtcattgattttagcttcattctttgctggaattacgttcttggcatactatagtggaattacaccaagttcttctcaaaccgttttatctcaaatcggtgtgacaatttttggacatggtattttctactacatccttcaattatcaacggcattgattttggccgtggctgctaatactggtttctcagcctttccaatgttggcatataacttagctaaagataagtttatgccacatgcttatatggatcgtggtgaccgcttaggttattccaacggtattatctccttggctgctggagcgatcgttttgattttaatttttggtggacaaacaggactattgattccattgtatgccattggggttttcgtacctttcacattgtcacaatcaggaatgattgttcattggaagcgtgaaggcggtaaaaagtggatgataaatgcttccgctaacttgctgggagctttactatcagccgttttagtaatttgtttgctattcttacactttagcaatgtttggccatactttattgttatgccactcttgttaagaatgttctacaagattcgtaaacattacgatgaagttgctgatcaattacgagtaattgaaaaaggtaaagttaacttgcacgactatgatggttcaactgtgattgtcttagttagcaacgttactcaagttacttctggagcaattaactacgctcgttcaatcggggactacgtaattgcaatgcatgtctcttttgatgctaatcctgaaaaagaacataagaccgcgatggaatttaaagctgaatatccagatgtacgtttcattgatatccattcatcttatcgctcaatcacgaatccaaccttacgtttctgtgatgtgattgcccggcgtgcggctgaacgaaactacacaactactgtgttagttccacagtttgttccaagaaaaccatggcaaaatattttgcataaccaaactggtttgcgtttacgtgcttctttgaactcacgtgagaatattattgtctcaacctataattaccatctgaaataaataaaaagtaaaacctagctgaggctaggtttttttgtgtcaaaatatgaaaaaataatttaaattctttgcatttttagtgaagaagattgtataaggctcatgagtttaggtataatgtgcttattacgaacaaaaagaggacaaattatgcgatttgaaataattgttagtttatttgcgacaatgatcatttcggcgatcttaacaccatttgtccggaggatttcattcaaagttggtgccattgacaaaccgacagctaggcgagtcaataaagtaccaatgccaaccatggggggattggcaatcttcattgccttcaatttctcattatttttcttattgagaaatcaaatacctaatccgcagttttacggaattttcttcggggaatgcattattttagtaacaggaattatcgatgatatttttgaattaagacctatacaaaaaatgattggaatcttgttagcggcgttagcggtgtatctatttgctaacgttcggatgacgacgttaactttcccatttattggaattgttaacttcgggtggttttcgttaccaattacgttgctatggatagcagctattacaaatgcgattaatttattagatgggttagatggtctagcgacgggggtaacaatcattgcgttgtttaccacaggatttaccggactattctttctaccatctactaatatctacattgtaatcatgatttttaccttggtagcagctgaaattggttttttaccttacaatttctttccagcacggatttatctcggtgatacgggagctttatttatcggatttatgatttcaattttctcattatctggtttgaaaaatgcaacctttatcacaattttaattccagttatgattttgggtgtgccattgactgatacggtttatgcaattttgagaagattattaaataaggaatctatttcacacgctgataaacgccatctacatcatcgtttgatgcaaatgggcttaacccatcgacaaacagtgttagtgatttatggaatttcactaatcttttcctttattgcgctgctatatcccgtttctacgttgtggggctcagtattgttaaccatcggaattttgattggaatcgagatttttgtggaagcaattggattagtgggcgaaaaccgtacgccaatgctaaattggattcgaaagctcgtacgctctaatacttctaaagtagatagtaatgaatttaaagaagagaacactttaaaagataaagttcgcacacgtagtgaacgccataaaaaatgaggataataacgatattagtcgttgtcatcctcatttttttgatatggaatttgaactcgttcggtacctaaatccttaaaggccacattcccactaaaaagaccgattagttctttctttaagggttctaattgttctttggaaattgaaatagtagtagttacttgggtagtgtattccgtttctaactggtttaaatgatgttgttcaagataataaactaagtgatcattgttttgataatcaagtttaatcgataaaagctcttgatcaacaagttgaatcaaagcagcattattaacggctagggaagtacttgatccataggcgcgaattaaaccgcctgctcctaacttaatgccaccgaagtaacgcgtcacgacgatcaatacattggttaagttctcgcgttttaaaacctctaggataggagcgccggctgttccagaaggttcaccatcatcagaggcccgttggatatcttgctggtcacccaaaatgtaggcaaaacagttgtgattagctttagcttcgattgtgcggatttctgttaaaagttgattggcttcctcttcgctttgaatgggaataatccgagtaataaatcttgattttttgatatcttgttcaattttaaaactttctttgacggataagattggtttcaagaaaaagactcctttttaggtatttaacaaatatgaaagaaatagaaaagcaaaaatactatggacggctggttttacagccaattaatgcagtaccaacggatgcgcttgattgtcgaccagcaattgtaatgaaaggaaatcaaattcactgccaacgatgtggcgcaattacctctagtagggatggggcattaccagatcatcaattctattgccgtaaatgtatcaacttaggtagagtttctaccctggttcagttagcgaccattcctgagcctaataattttgtggcgaatcagagttatttagaatggccgggaaagttaactgctccgcaagctcgctgttcaaaagcgattattaattccattgatcagcaacagaatcgtttactttgggcggttactggggcagggaaaactgaaatgctcttcccgggaattaatcatgccttacaaaagcaaaaaagaatatgtgtggcttcgccccgaattgacgtggtcttagagctgtttcctcgatttcaagaagcttttccacaggctaaaattgccttgcttcacggtcgatccccagctccctatgaatatacgcagtttgtgctctgtacaacgcatcaattactacgattttaccacgcctttgatgttttaatcattgatgaagtggattcttttccctatgcgatgaatcctgagctgcattatgcaaccaagcaggcccgtaaattacaaggatcgaccatttatcttacagctaccccagacggaaaacttttacagcaaagtcggcaaactaaattagccaccagttatctaactcggcgttttcatggacatccactaccagaaattaaagtagtgagtgggcaaaattggatgaaaaagttaagaaagggtcgattgccaagcccattaagccgatttattaaggaacaaattcaagcacagcgccaatttttaatctttgttcccaaaattgaggtgctatcgaaagtattggaggctttgcaacaggtctttcccacggtcaaagttttaacagttcacgcagcagatccagagcgggtggctaaagtgcaaatgatgcgtaaacaggaaattgacgctttaattacgaccactattcttgaacgtggagtgacttttccgggtattgatgtcgctgttttaggagcagatgatgccgtcttttccatggcagcattggttcaaattgctggtcgagttggtcgaagtccccaacgacccaaggggactgtattatttatttgtccaatgttaaatcgaaatataaaaagagctcaagcccaaatcaaatttatgaatcgaaaggcgagtgaatgttgaaaagttgcttattttgtaaccgaggattaaataataatttagatttatcttttattttaagtttcagaaaaattactccaaagttagtttgcgaggggtgtataacgagtttttccacattagtagatcacaaaacgtgtattagatgtggaaaactttcagcaatcctcgagtgtgcggactgtcaacgatggaatgatcagttcgtaaatcgagccatgtttcaatatgatgaggcgatgcgtaatttttttcagcattataagtttcagggagattatttactgagaaaagttttccaagatcaatttgttaattttattcaaaagatccttaaagaaaacgagttgattgttccgatcccagttgatgagagtacaatgatctcacgtggatttaaccaagtaactggattgatggaaggtctggattggaaagatgttttgattaatcagcgctcaaacgatagtttacatcaatttcaacgttcaagaagagagcgactacagcaagatagtccttttgctttgaaaagcggatgtgatattagtggtgaacatattttgttggtggacgatatttatacgaccggagccacccttcgacaagctcggaccactttactaagaaatggcgcgacccaagtccgttcagtcatgctttgtcggtagttatttgggtatattcattgtttattgtagcgttttcatttataatgaagttgtacagaaatacatgaagtagaatatatatttctgttagtggatgcagtttatccacagttgaaaggagagaagtcttatgcttgattttaatgtacgtggtgaaaatattgaggtaacagaagcaattcgggattatgttgagaaacgaattggtaagattgaaaaatactttgaacaaggtgccaatccaaaggctcacgttaacttgaaagtataccaagacaaaacggctaaggttgaagtaacgattccattgccatacttggtattacgagcagaagaaacttcgcctgatttatatgcgagtgttgacttagtaactgataaattggaacgtcaactacgtaaatacaaaacaaaaattaaccgcaaatcgcgtgaaacaggatacaaaggggttgaaatccctagtggtgatattgtagagaacgaagaggaaaccagtcaatttgacatcgttcgtactaaacaagtgtccttgaaaccaatgggaagtgaagaagcaatcttgcaaatggacatgctaggacataacttctttatctatgaagatgcagaaagtggatcagttgatattgtttatcgccgtcgcgatggacgctatggtttgatcgaatctgctaacgattagatccgctaaataaatacaaaacaaaattgcttaacaaacttccaacggtttgttaagctttttaaatatatttaagattagtttgattgtaataataaaaatgataaacttaaacaggttatcgtttttacgattaagttagtacggaaggaaatagtacatggcaaacattttaaaaaaatgggtggaaagtgatgcgcgtgagttaaaaagactcggtaaaaaagcggataagattgaagccctaaaagaagaaatggaacaactaaatgatgaaaaacttaaggctaaaactacagagtttaaagagcgtctacaaaatggcgaaactttagatgatattttagttgaagcttttgcagtcgcacgtgaagcagctaagcgagtattaggcttattcccattccgcgtccaattaattggtggaatggtacttcatggtggtaacattgctgaaatgaaaactggtgaaggtaagactttaacggccacattacccgtgtatctgaatgccttaggtggtaaaggggttcacgttgttactgttaatgaatatttggctgaacgtgactcaagtgaaatgggtgagctttataaatggcttggcctaacagtaggggttaattcttcagaaatgactcccgaccaaaaacgtgaagcttacaattgtgatatcacttattcaacgaacagtgaaatcggttttgattacttaagagataacatggttgtgtataaagaggatatggtacaacgccctctaaacttcgccttgattgatgaggttgattcaattttaattgatgaagccaggacacctctgattatttctggtcagactgaaccaactgttacgctatatgaacgtgctgaccgttacgtgaagactttggctgatggtgattacacgattgattgggaatcaaaatccatctcattaacagaaaatgggattcgtcgtgcggaaaacttctttaaaaccgacaacctctacgatgttgaaaatagtgcgttgaaccatcatattgatcaagctcttcgagcaaattatattatgactaaagacaaggactacgtggtttcagatggtgaagtcttaatcgttgattcttttacaggtcgtgtaatggaaggccgtcgtttttctgatggactgcaccaagcgattgaagctaaggaacacgttgaaattcaagatggggctaaaactatggccaacatcacttatcaaaacttgtttagaatgtatcgtaaactttcagggatgaccggtacagctcggactgaagcagaagaattccgtgaaatttacaatatggaagttacaaccattccaaccaaccgtccggtggctcgtgatgaccgtccagatttactttatccaactttggaaagtaaatttaaggcagtggtgaaggaaatccgtgatttgcatattaaaggtcaaccagttctagttggtacggttgcggttgaaacttcagaatacctctcacgcttgcttgatcgagaaggtattccacatgttgttttgaatgctaagaatcatgcccgtgaagctgaaattgttaccaacgccggtcaaaagggtgcggtaacaattgctactaatatggctggtcgtggtactgatattaaattaggacctggcgtagttgaactaggtggtttagctgtaattggtactgaacggcatgaatcacggcggatcgataatcagcttcgtggtcgttcgggacgtcaaggtgatgtcggaatgtcccaattctatctttcactagaagatgacttgatgattcgttttggttcagaacgaatcaaagatttgctttctaggatgaaaattgcggatgaagatgcagttattcgaagtggtttaattagccgtcaagttgaatctgctcaaaaacgagttgaaggtaataactacgatgctcgtaagaacgttcttcaatacgatgatgttatgcgtgcgcaacgtgaagtgatttacgctgaacgtcaacaagtaatcatggaagaaactagtctaaaagatgtgctaatgccgatggttgatcgaacgattgaccgcgtggttcatgcccatacccaaaaaactcaaaagaactttgatttagaaaccattgtagaatttgcacgaactgccttggtttcagataaagacattcatcaagctgatgtggaagggatgtctgctaaagaaattaaggactacttgaaacaactagctgatcaaatgtacattgaaaaagaaaaagctttgtacgacccagctcaaattctagaatttgaaaaagttgtgattctccgagtggttgaccaacactggaccgatcatattgatgccatggaccagttacgtcaatcggttggacttcgaggctatggacagttaaatccattagttgaatatcaacaagaaggttaccgaatgttcaacgaaatgattacagatatcgaatatgaaactactcgattatttatgaaatctgaaattcgtcaaaatcttcaacggtagttgatttataatataaaactgggaaggtaatttgaccgttcccagttttttaatgtgaaatgaaaaaaggagctaacttatatggagctagttgaagcaaaacatcaaattgaagatatgaaaaaagaagtcgttgacttcgggaggtctctttgacttagatgctttgaatgaaagtatcagtgtcaatgaggccaaaatggcagagcctaacttttgggataatcaagaacaggctcaaattgtcatcaatgaaaataatgagttaaaacaaaaatacgataattttaaaaatttaaccgaccatgttgaaaacttagaggtaactgctgaattattggaaatggaagatgatcctgacgttcaaagcgagtttgagagtgaattagccgccacggctaaattattgcaggattaccgtttaggattattgcttaatggtaaatatgatgccaataacgcaattgtagaaattcaccccggagcgggaggaacagaatctcaagattggggttccatgttgctaagaatgtacacgcgttgggctgagcagcatcagtttaaggttcaaattgaagattaccaagcaggtgaagtggcaggaattagcagtgtaaccatgcgaattgtgggtcacaacgcatatggttatttacgctctgaaaagggagttcatcggctagtaagactatcaccatttgattctgctggacgacgtcatacttcttttgcatcagtcgacgttatgccggaattggatgattcggttgaagttaacattaaccaagatgatttacgggtggatgtatatcgttctagtggtgctggtggacagcatattaacaagacttcttcagcggtgcgaattacgcatttaccaactggaattgtagttgcgagtcaagcagaacgttctcaattacaaaaccgggctaccgctatgagtatgttgaaggctaagctatttgagcttgaagaacaaaagaaagcagaagaaaaggctaaaatagaaggtattcaacttgaaataggatggggatcgcagattcgttcttacgttttccatccctattctatggttaaagatcatcgaagcaactttgagacggctaacgttcaaggtgtgatggacggggatctcgatgattttatcaatgcttatttgcaatggaaattgaaagaagataatccaaaatagggggattcggatgtcaaagacgatattagttgtagatgatgagccagcaattgtgactttaattacttataatttggaacaagctaattatcaagttgtgagtgtggataacggtttagatgcggtggaaatcgtccaaaagggcttagttgattttgtgattatggatttaatgctccctcaattggatggaattgaagctaccaaacaaattcgcaagtttgatgaacaaattccaattattatgttgacggctaagactagtcaagttgataaaatattgggattggaattaggggcagatgattatattaccaaaccatttagtcctcaggagcttctttcacggattaaagtaatcttgcgacggactgatcgggcaattaatttggctgaaattgatccaactctacaagcagaaaatatcgccattgatttcaaaagaatggtggttaagaagaataatgaaaaaattcaattaacacccaatgaatttaaactattaaggtatttatacaaaaatgccaaccaagttttatcacgcgatcaaattttggaaaaagtttggggatatgaatatgggggacagacccgtattgtggatatccacatcagtcatttgagggataaactggaaaatgatcccaaacatccacagttgatcaaaaccattagggggtttggatatgagttcgtctcgaaaaaaggcgattaagcgtaccgtgcaattcggttttgctagtctaatcggaaatgcctttatggcttttctggtgtataaattaattgtaaaagaaaatccacgagtaactaaggtagatatgacactgttaatcgccgtgattttattaattacggttattgaaataattgtattttggagtaatcaaaagaaaattattgagcgtcaaaagttattcagaaagaacttagaagaagttattaaaggtaaccatgttcccaagattcaattggatccagaagatccattttataaattatctaaagttgttaatgaaattggtacccatgagcgtcatcaaattcacgttttgagaaatcaacaaagtgaattaaccgccattatggataatttgccagtaggagtgctagttatcaatcggcaccgtgaactacaagtggctaacacgtacgctattaaccacttagggattactggactcgacgttcctcacccatataccatggatattcgggatcatgaattaagtgaattggtggataacgtgtttagaacacgccagagtactaccaaaacaattaaactagatggggaccagccatatatttatgaaacaacggttgtttacagtcccaaagtgcaccataaatttgaaattattgtgctactttacgatgcaacggaaacggtgcgctctaaacaaattgaacgtgactttgttaacaatgcttcgcacgaacttcgtacaccaattacatcgattgcgggcttcgcagatacgttactaaacggagccaaggacgatccagaaaccttggataatttcttacgtattattaaggctgaaagtgataagttagtgcaattaacggacgatattttaaccatgtcgcgcgttaagagtggtgaacgagaacgtaaagaaattaatttacataagtatgtggatcaacaacttaagttagtagaaagtaacatcagtagcatgaatctacatgtggaaaacaatattccagcagatgttaatgaagaagtgattgaaaatgatttattccaaatcgtcaagaatttgattactaatgcgattagttacaatcgaaaaggtggaaaaatcaagattgattacggatcacatcatgaccgttggaagctcgtagtgagtgatactggtattggaattcctttaggacagacggaccgcgtttttgaacgtttttatcgggtgaataacgctactaaaggtggtactggattaggtttagccattgttaaagaagcggttgacgatatgaatggtagcgttcgaatcgaatcagatgaagatagcggaaccacggtgatcgtaaaattcaagcgtgatattaattaaatattgtggaataaagttgaattttaattcggctttatttttttttacactttttactattttaaaattctttacataatctttacatacctcatatttaacctttacgttgcccttgtatgctaataatcgaagctagagattagggaaaagaggccaggacatgaaaaaagttaataaggggattatcttagcgtcgatgatggcaatactcttgattttgactggatgtcagtctaagtcatctcaaaaaaattcagtaacgattgtgggatcgacggcgttacaaccattagtagaaaaagctgctgctgattatcaagtaaaaaatagcggtgtggatatcactgttcaggggggcggatctgggaccggtctaagccaagttcaacaaggcgccgtaagtatcggaaattcagatgtttttgcagaacaacaagatggaattgatgccaaaaaagtggtggatcataaggtagcggtggttggaatggctcccgtggtcaaccaagatgttccaattaaaaatatttctatggctaatctacgtaaagtatttacaggtaaaattacaaactggaaacaactggggggacccgatcaaaagattgtggtcatcaatcgagctcaagggagtggtatccggaaatcattcgaacgagtggtattaaaaggacaaccagctttgaatgctcaagaacaagattcaaatgggacggtacaaaaaattgtacaagcaactccaggatcgattagttatctttcattctcatattttaataaccaaattaaacatttagcgattgatggagttcaacctaacgctaaaaatgtggaaaataatcgttggaaaatttggtcatatgagcacatgtatacgaaacctaatgccagtgcagcaaccaataactttattaaatacatgaaatctgaaaaagtacaaaagaatttagtttcagacttaggttatatttcaatccatgatatgaaggtagaactaacaagtgatgaccaagtaatcccaattaaaggagctgaggaataatggatgcagtaaaaaaagaattaacgcgtaaatcaaaggcttccaggcaggaccagcgtggaaagttaatttccttagcttgtgtaactttgattatgttggtagtcctttcaattttatacatgattacttctaaaggtttagcaactttcttcgaaaataaaatgagtattgttgatttctttactaagcaggtttggaatccgagtgctaaacctcaagcgttagtgggcgcactaccgatgattgtaggatcattcagtgttaccgttctttcagcccttttggcagcgccatttgcgattgccaccgccatcttcatggttgatattgcaggaaaacgtggacgtaaaattttacaaccggtcatcgaattgttggtgggaattccatcagtggtttacggatttatcggattgacggtcgtcgtgccctttactcgaacagtatttggtgggactggttttggaattttgtcgggaaccttcgtactgtttgtcatggtcttaccgaccgtaacttccatgtacgttgatagtttaaaagctgttccacagttttatcgcgaggcttcattggctttgggagccacacggtggcaaacaatctacaaagttatcattcgagcttccattccaggcttactaactgctattatttttggaatggctagagcctttggtgaagccttagctgttcaaatggtaattggtaatgcatcgattttaccaagtgacttagtatcaccagcctcaacgttaactagtgtgttaacaacgggaattggaaatacagttttagggaccttacctaataatgccttatggtcattagcattggtgctcttactaatgtccttggtatttaacctcctaacaaggtttattggaaagaagggagcattttaaatgaacgctaagagagttgataagattgctacagccgttatttatctattagttggaatcgttattttaattttagtggctctactaggttttatcttgattacggggttaccacacgtcacctggtcatttttaacctcaccagcatcggcatttaatgctggaggcgggattggtgatcagctctttaactccttttatctactatttctaaccttgttgatttcttttccaatttcgcttggagctggaatttacttagcggaatatgcgaagaaaaatcgagtaactgaagctattcgaattaccattgaagttttaagttccttaccatcagtagtagtggggttatttggatttttactcttcgtagtgcaatttaaattaggattctccattatctcaggagcgattgctttaaccttcttcaacctaccgctgttaactcgaaatattgaaaattctttaaatggtgtttctaatttacaacgagaggcggggctttcattaggactttctcgttggaaaaccgttactaaagtggtcgtgcctgctgctctaccaggaatcataactggaattattttaagtgctggacgcgtttttggagaagccgccgctttgatttttaccgctggacagagtgctccagtattaaactacgtaaattggaatccttttagtggcgacagtcccttgaatattttccgtcctgccgaaaccttggcagtgcatatttggaagattaataccgaaggaatcatgcccgatgccagtcaagtttccgccggggcttctgcagttttaatcattgcagtattagtctttaatcttggggcccgttgggcaggaaattatgtttatcgtagaatcactgccagcaaatagaatttggaggaaagcatatgttggaaacgaaacgtaaagaaaaatcaattttgaccttccccgccgatcgcgaaattgctttagaaacgaataaccttcaggtctattatggagataaccatgccatgcaggatgcatctttgcaattccctcgttattccattacggctttgatcggcgcttctggatcggggaaatccacttacttgagaagcttgaaccggatgaatgacggcattgctcgcgtagatggcgagattatgtatcgaggattggatgttaatgcggatgaagtcgatatttatcaaatgcggcgtcggattggaatggtatttcaacgtccaaatccctttgccaaatcaatttacaacaatatcagttttccattacgcgaaatgggtattaaagacaaatcaaaaatcgatggcattgtagaatcgagtttaaaacaggcggccttatgggatgaagtcaaggatgacttgaaacgtagtgcgttagcattgtcaggggggcaacaacagcgactatgtattgcacgttcactggcaatgagtccagatattctattgatggatgagcctgctagtgccttagatcccatttcaacccacaaattagaaatgactttaaatgacttaaaagaacaatacaccattattatcgttacacacagtatggaacaagcttctcgactaagtgattacactgcttttatgcacatggggaaaattgttgaatttgatacgacagaaaatatttttactaatccagcagttaaattaactgaggactatgtctctggaaactttgggtagttaggagaaaaatatggcaaaagatattattacggctgaaaatgttcatttatattacggacaaaaggaagctctgcatggaattagtctcggcttccctgaaaaagaaattaccgctctgatcggaccctctgggagcggaaaatcgacgttcatcagaactttaaatcgaatgagcgatttaaaccccgaagttacggttaccggagccatccgacttgatggcgaagacatctattcgcctaaaacagatacggtagaactgcgcaaacgagtcggaatggtatttcaacagcctaatccttttcctttttcggtttatgataacgtaacttacgggctacgactcagtgggataaaagataaggcactgttagatcaacgtgtggaagaaagtttaaagctggcggccgtttgggatgaaactaaagatcatttaaaagaaaatgctctttcattttctggaggacagcagcaaagaatctgtattgcaagggttttggcagttcaacccgaaattattttactagatgaaccaaccagtgcgttagacccggtatcttcagcaaaggtagaagatagtttattagcaattaaggatcaattcaccatcgcggtcgtaactcacaatatgcaacaagcatctcgaatttctgatcaaacagcttttttcttggatggcaacttggtggaatttagtaaaacagtcgatatgtttacacatcctgaaaaacaggagacgagcgattacttaaacggtaaatttggataggaggaactagcatgagagggatttttgataatgagttgaggcgcctattaggcaagtttacggagatgggaattaacgttagtgaacagatttaccgtgcgactaaatcgtttattgaccatgatcgagaaatggcgcagagcgtgattgattatgataataacgtcaatgaagaagaaattgctttagaagatcaagctttaaaattgatggccttacaacaacccgtggctgccgattttcggcaggtgattgtcgtcttaaaagctagttcagaactggaacggattggcgatcatgcagtcggaattgccaaagaaactattcgaattaaaggacatcatcgggatgctaaaatcgaagccgaaattgctgaaatgacgaacgttgttcgaacgatgctggatgttacgatggatgcctacgtaaaaagagatagtaaattagcggatgaagtaattaaagccaacgagcagattgataacagctataaaaaaattcgtaatgaagttttgagtaatatgaaaactaaccccaaactagtcactgggggagcagggtatttaatggtggctaactacattgaacgaattggcgatcatgttaccaacgttgtagagtggattttgtataatcagtcaggaaagattaccgaaattaatgcagatgtcgcagatgtgggtggaatcgattagaccacgaaacgagtagttattgctaaattaaaaatttagtaataactactcgtttttttgtataaagtttgctaaacgaaagacaaaagctgtaaaattactattaacaataatgtttagaggtgaagtatttgaatatgaattccaaaacaaaatttgctaaatcaaatgaccgtttgataaccggggttagcggcggaattgccgaatattttggctggagtaaagccctaactcgggtgattatgttgatgttaatgttagtatcacatggacttttgttaatcccatatattattttagcttggttaatgcctagtaaaccaattgaatcaaatcaaggctttgccagcatgttcagtaattatatgggtagtatgaacggtcagtctcaaaataataagaagagaaaagaaattaaaaacgttgaagaacacgacgtcaacgaataaagatgggagaatttaaatgcgcttttggcaacgagtattagttaattgcattctttttgtggctttgaccggatttttccaaagtaatggaaatttctatgtttcaagcatctggattgctttggtggctagtttgattttggcaatattgaatgccagtatcaggcccatcctacaaattatttcattaccaattacattgttaactttaggcttgtttagtattgtgattaacgctctcatgttggaattaacttccgtatttgtaggagcatctaatttttatttttcatcctttgggatgacgatgttgatttcggtaatcttatccatttgtaatactattatttcgaaccactttacaaatcgttagcgaaggaggcccattcaatggccgatggtgtttcagtatctgagttagtagaaaaaataagattagatgtattttatggcgatgaactattagaacaaaaaaaagttacagttagtgatatttcacgtccaggtttagagttaaccaattactttaaattttatcctcatgaacgaattcaactgtttggagaaacagaaatttcgtacgctaaggatagtatgactaaagatgaacgaactaagatttatgatcgaatggcggacgttgatactccagcatttgtggtttcgcgtggtttaccaattcctgaagaattgatccaggccgccaaaaataatcaggttcccatcttaacgtcaactttaccaacctcacgtctgctaagtaacatgaccaactttttagaagatcggttggcagaacgtgattcaattcatggtgaactactggaaatttatggattaggggttttaattacgggagactctgggattggtaaaagtgaaacggcgttggacctaatcaaacgcggacatcgtctgattgcggatgatcgggttgatatttaccaacaagatgaacaaaccttaattggggaagctccccgcattcttcgccatcttttggagattcgaggtgtcggaatcattgatgtaatgaatttatttggggcgagcgcggttaaaaatcacacggaaattagtgtgattgttcatctacaaaattgggataaagatgcgcatttcgatcgtttaggtaacggcgaacaaacacgacatttctttgaattagatattccaaagattaccatcccagttcgtgttggacgaaacctcggtgatattatcgaagccgctactatgaactttagagctaaaaatatgggatatgatgcaaccaaagtttttgatcgtaacttaaatgagttgatcaaagataattcccagaaataggagtggattttgtgaatttaacgttaggagcactaaatccaattgcctttaatcttggtggaattcaagttcattggtatggaattatcattgcgtcagcagtggtgttagcgacgattttggcagttcaagaagctaaaaggcgaagaatcgatccagattctatctacgatttgattttatgggccttaccagtggcgattattaccgctcgaatgtattacgttatttttgagtggggatattaccaaaaccatgtcgatgaaattgtccgcgtttgggacggtggtattgccatttatggggccttgattggggctggaatcgtggtctacctcttctgtcgtgcaaattggattccagtttggttaatgttggatatcatcgctccagtattgattatggcccaaggtattggtcgatggggtaattttatgaatcaagaggctttcggcagaattactagcttaacatttctccaaagtcttcatttgccccattttattattcaacaaatgctgattgatggagcctaccgtcaaccaacttttttatatgaatcgctttgggacatcttgggctttattgtattgatgagtttgagacataaaaaacatttattcaaacaaggggaagtgttcttgtcctatgtaatttggtatgcgtttggtcgcttttttgtcgaagggatgcgcactgatagtttgatgctattaggcatccgcgtgtcacaatggctttcggtaatactttttatcggagcaattggtatattggtgttccgccgtaaatcgatgcgagaacgcctaccagattatttggaaggtaatcagctttcaccaaaatgaacttgagtaaagtacctttgtatacgataatagaaaggtacataaattatttttaaatttaagattgtaaggggattaactatggtaaaaaaagttgcagtgttaggagccggatcatggggcagtattttagctaacatgcttgtccaaaatggcaatgatgtagttgcatggacgaacatggaggaacaagctaaagaacttaacgagcagcactccaatgaacattacgttcccggttttaagtatgacgaacgtttagtagcaacaaccgacttagaagtagcgttgaaggatgttgatgcggtattgtttgttgtaccaaccaaggtaatgcgattagttgcccaacaaatggttgaagttttaaagaaaactggtcaaaagccaattattgttcatgcaagtaaaggtttggaacttggaacgcataagcgtttgtcagaagtattagcggaagaaattcctagtgaattacgtcaagctattgtagttctttcaggtccaagtcatgctgaagaagttgctaagcaagatttaacgcttgttacagcagctagctcagatttagcaagtgctgaagcagttcaaaaattatttatgaataattacttccgcgtatatactaatgacgatattgtcggagttgaaatgggtgccgcacttaaaaatgtaatcgcaattggagccggagcattacatggcttgggttacggtgatgacgctaaggcagctttaatcacacgtggtttagctgaaatttctcgtttaggagtagcctttggggcaaacccactcactttcatcggtttatctggtgtaggtgatttgattgttacggcaactagtgtgcattcacgaaactggcgtgcgggtaacgaacttggccaaggtatgaaactagacgaagttattgatacaatgggaatggtgattgaaggagttccttcaactaaagccgcctgtgaattagctcagcaaaaaaatatcgaaatgccaattactgaagctatctatgatgtattgtataatgaaaagggtgtcaaggaagcaatcgacgaattgatgcatcgtgacggtaggtcagaattagagtaaaaatttttggaggttaggtattcatgaaaaaagtacgtaaagcaattattcctgcagcaggattaggaactagatttttaccagtaaccaaagcttcacctaaggaaatgttaccaattgttgataagccaacaattcaatacattgtggaagaagctcgcaagtctggaatcgaagatatcctaattattacaggtaaaggtaaacgtgctatcgaagatcactttgatgcggttcctgaactagaagaaaacttgaaagctaagggcaagaaggaaatgttgaagatggtggaagaaaccactggcttaaatatgtacttcaaacgtcaaagtcatccacgtggattaggggatgctgtattaactgctaaatcattcgttggcaacgaaccattcgtggttatgcttggtgatgatttaatggaagacaaagttccgttgactaagcaattggtagattcttttgaagaaactggcgcttcaactttagctgttttgccagttcctcatgaagaagtatctaagtatggggttatcgatccttctgaagaagttgaaaaggatttatacaacgtttctaaattcgttgaaaaaccagctgtagatgaagcaccaagtaacttagcaattatcggacgttacgtacttacgccagaaattttcaacattttggaaaaacaaggccttggtgaaggtaatgaagttcaattaaccgatgccattgatacattaaataaaaaacaacgcgtatttgccaaagtatttaatggcgaccgttacgatgtaggtaataagtttggcttcttgaagactaatattgaatatggtttaaaacatcctgaaacaaaagatgaattaaagacctacatcaaagaattagccaaagaacttgaagaaaaataattattgtatttaaaatcaagcgattctgggttgaccggatcgtttgattttttatataaaacaaaatgatagacagttattaaaagtaagtgtatagtgaatgcattattaaaagtgtggaggaaagagaatgacaaaacaatatgatgttgttattattggggccggcccagccggaatgacagcggccttatatgcttcccgtgcaaacctatcggtagtgatgctagatcgtggaatctatggtggtcaaatgaataatactgctgatattgaaaactttcctggctttaaatctgttttaggaccggatttatcaaaagatatgtacgaaagttcaactcagttcggcgctgaatatgcttacggcagtgtcgaatccattcgagatgacggagctactaaactcgtcaaaactgatatgggtgacgagttcgaagctaaagtagttattattggtactggttctgaatataagaaattaggtgtaccaggcgaagaagattttagcggacggggcgtttcgtactgtgcggtctgtgatggagccttttttaaagggacagatgttgtagtggtcggtggcggagactctgctattgaagagggtttatacctaacacaattagcttctaaggttaccgtgattcatcgtcgtgaccaactacgggctcaaaaaattatccaagatcgtgcttttgccaatcctaagatggaatttgtctggaacagtaatgttacagaagtagttggtgaaggtaaggtcacgggcgttaaagttaataataaccaaactggcgaagattcatttattgaagcagccggagtattcatttacgtaggggtaaaacccatgacggccgcctttgcggacttaggtattttggatgaacaaggttggattccaactgatgaccatatgcatactaaggttcctggaattctagctgttggtgatgtacgtaagaaagatttacgtcaaatcacaacggccgtaggtgacggtggcgtcgctggacaacaagcgtatgaatatattcaagctttaaatgattaaagtcaaaataagccacggtgaaaaccggggcttttctttttgccaaaattcaaaaagtgattggtctatagctaaaattaaaaaaacgctttctggtattccatgggtattgtataatgaaagtaactataagttacatcataggaggatttttgaatgagttgggaagattctgtcaaagaatggcaagattatgcagatctagattttaatttaaaaaaagaattagcaactttagctgaagataaagatgctttaaaagaagccttttatgctccaatggaatttggtacagcaggaatgcgtggcgtaatgggccctggtatcaaccggatgaatatctatacggttcgtcaagcaacagaaggtttagctaattttatggataccttggattttaatgataagaaacggggagtggcgatcagttttgattcccgctatcactcacaagagtttgctttagcagcagctggtgttttaggtaagcatggtattccaagttttgtttttgatagtatgcgtcccactccagaattatcatatacagtacgtgagttaaacacttatgctggaatcatgattactgctagtcataatcctaaacaatataatggatataagatttatggtcctgatggcggacaaatgccaccaatggaatctgataagattacagaatatattcgccaagtaactgacatctttggtgttgaagctcttactcaaagtgaattaagagctaagggcttaatgaccattattggtgaagacattgacctcaagtatcttgaggaagttaagacggtatcaattaatcatgaactaatccaacgctttggtgcagacatgaagttgatctactcaccattacatggtactggaaaagtagttggtggacgtgcgttagaaaatgctggttttaaggattacactatggtccctgaacaagcaattgctgacccagaatttattacaacgccattccctaacccagaattcccacaaacttttgatttggctattgaattaggtaaaaagcaagatgctgaccttttgattgccactgatccggatgccgatcgtttgggagctgccgttcgtttaccaaatggtgactacaaattattgacaggaaatcaaattgcagccctgatgttagaatacatcttaactgcgcatgatgcagcaggtgacttgccaagtaatgcagctgccgttaaatcaattgtttctagtgaactagcaaccagaattgccgaagcccatcatgtagaaatgattaacgttctaactgggtttaagtacattgctgaccaaattaaacattacgaagaaaatggcgaccatacctttatgttcggtttcgaagaaagttatggctatcttgttcggccatttgttcgcgataaagatgccatccaaggaattgtcctattggctgaaattgctgcttattatcgtagtaaggggcaaaccttatatgacggtcttcaaaacttatttactacttacggatatcatgaagaaaagaccatttcaaaagatttccctggagttgacggtaaagaaaaaatggctgccattatggaaaaggttcgtgaagaacgcccaagtcaatttgatcagtacaaggtattagaaactgaagacttcttagctcaaactaagtatgaagcagatggatctacccaagctatcaaattaccaaaagcggatgttttgaaatttacattagatgatggtacttggattgcaattcgtccttctggaacagaaccaaaaattaaattctatattggtacagttggtgaagatgaaaaagatgctttgaataagattgatgtttttgaaacagctattaatgaacttataaaataatatttaaagaactatgacggagctcaaattgaatggttatgcgcgattcagttgggcttttggagcatagttcttttttattctaattaagtgaatcggaaatggttttgtgatagtattagtaacaatttaagtaagtttaaggagagattgccatgggaatgcatcaatatttgaagagtttaagtaatttagaaacaatttatcgggcaccaggattttttaaatatcaaaaacactcggttgcagagcattcgtttaaagttgctgaaattgcccaatttttaggtgatattgaagaaaatgctggtaatgaagttaattggcgctcactttatgaaaaatcattaaatcatgattataacgaacgttttattggagatattaaaacccccgttaagtatgcaacaccggatttacgaacgatgttagctaacgtggaagattccatgaaagacaatttcattaaaaatgaaataccagtagaatttcaaggagcttacacgcgtcggctctcagaaggtaaggatgacacattagagggacaaatactttctgtggccgataaaattgatttattatatgaatcatttggtgaaattcaaaagggaaatccggaagatgtttatacggaaatttataaggaaagtttacggacgattgttgaattcaaaacgatggccagcgtggagtatttcttagataatgtcttaccagaccttttgaatgaagagtttactgatcaacttaaattggaacgcattagtcgtgcaattatcgcgtagttaaaaatggcgaaagtatgttcggtgtgataaaatagttatggttaatttcgagtaaatataattttaggaaatggctgagaactgatcctgatcggttcaatctcagtcattttgtgtgaacggaggaaaacgaatgattaaacgtgagaatgatcgtgaatttgaattggtttctaagtaccaaccaacgggggatcagccaacggcgatcaacgaattagttgacggtattaaaagtggcgaaaaagaacaaatcctgttgggtgcaacgggtaccgggaaaacttttacgatttctaacgtaattcaaaaagtgaataaaccaactttaattttgtcacacaataaaactttggcgggccaattatatggcgagtttaaacagtttttcccgaataacgcggtagaatattttgttagttattatgattattatcagcctgaagcatacgtaccatctagtgacacttatattgaaaaagactcatcaatcaatgatgaaatcgatgagctccgtcactccgctactagttcactacttgaacgcaatgatgtgattgtggtggcttctgtttcaagtatctttggtttgggtgatcctcgagaataccaagatcaagccttaacacttcgagtagggcaggagattgatcgaaataagttactacgagaattagttgatattcagtacgaccgtaatgatattgatttccagcgcggccgttttcgggtacatggcgatgtagttgaaatttttccggctgctaatgatgcgcattccattcgagtggaattctttggggatgaaattgatcgaatgcgtgaaatggatgccttaacgggagaaattattggtgatcgagatcatattacaattttcccagcaacccattttatgactaacgaagatcgaatggaacatgcgattaagaacattgaagcggaattgaaggaccgtttggaagaattagatggtgaggggaaactcctagaagcgcaacgtttacgacaaagaacgacctatgatatcgagatgttaaaagaaatgggatacaccaacgggattgaaaattattccagacatatggatggtcgtaaaccaggtgaagcaccttatactttactagatttcttccccgatgattttctattggtcgtagatgaatcccacgtaactatgccacaagtacgcggtatgtacaatggggatcgagctcgtaagcaacaattagtagattacgggtttagattgccaagtgcgttggataaccgaccccttaaattagaagaatttgaaaaacatattaaccaagtggtttatatgtcagctaccccaggtgattatgaaaatgaacggactaataacgtcgttcaacagattattcgaccaactgggttattggatccaatcatcgaaatacgcccaatcatgggacaaatggatgatttgctaggtgaaattaatcaaaggattgaaaaagacgagcgtgtatttgtaacaactttgacgaagaagatggccgaagatttaaccgattatctgaaagatatggggattaaggttgcttacttgcatagtgatattaagacgctggaaagaacccgtattatccgtgatttacgggtaggcaagtatgatgttttagtaggaatcaatttgcttcgtgaaggaattgatgttccggaagtatctttagtagcaattttagatgccgacaaggaaggtttccttcgaaatactcgttcgatgattcaggtggctgggcgtgcggcacgtaatgaaaatggacacgttattatgtatgctgatcatatgactaattccatgcaagaaaccattgatgaaactgcacgacgtcgtacgattcaagaagcatataaccgtgaacatggaattactcctcatacaattaaaaaggatattcgttcgttgatttcatcaaccagtgatactgaggataaaggtaaaaaagacgacttcttggacgttgattttgccgacatggatagtaaggatcaaaaagaaatgattgcaaacttggaagatcaaatgcgagcggctgctaagaagctagacttcgaaaaagcagctaacttgcgagatactgttttagaattaaaagcacagattggttaggaggcctcttttttggcaaatgataaaattgttatccacggtgcacgagcacataatttaaagaatattgatgttaccattccacgcgataaactagtggtggtgacagggttatctggatcaggaaagagttcattggcttttgataccctctatgctgaaggtcaacgacgctacgtagaaagtttgtcagcgtatgctcgtcaatttttagggcaaatggataagccagatgttgattcaattgatggacttagtccggctatttcgattgatcaaaagacaacttctaaaaatcctcgttcaacagtcgggaccgtaaccgaaattaatgattatttaagattattatgggcgcgagttggtcaaccaatctgtcccaatgatggtacaccgattaccagtcagacggtcgaacagatggtgaatcgagttttggatttgccggaacgttccaaggtgcaaatcatctcaccgattgttcgtgctaaaaaaggccaacataaaaaggtttttgaaaaaatcaaacgtgaaggctttgtgcgggtacgagtagatgacgaaaccatggatgttgaagaagtaccagaattggataagaacaaagttcacaccattgatattgtggtcgatcgtgtggtggttaaagacggaattcggtctcgtttatttgattcatttgaagcagctttacgcctcagtaagggttatgctacagcagatgtgattggtggcgaaccaatcttgttctcagaacattattcctgtccggtttgtgggttcacagtgggagaacttgaaccccgactattttcatttaatgccccttttggagcatgtcctgaatgtgatggattaggaattaaattggaagtggatgaagatttagtcattccggatccatctaaggcgttacgtgaaagagcaattgcaccttggaatccgattagttcgcaatactatccaaccttactagaacaagctgctaaaagttttggaattgatatggacactccttttgaggatttacctaaagcagatcgccagctcgttttatatggttctaaaggtaagaaattccatttccactatgaaaatgattttggtggagttcgggatgtggattccgtatttgaaggtgtaatggttaacattgatcgtcgctatcatgaaactaatagtgatttcacgcgagatcaaatgcggttatacatgcgcgaattaacgtgccaaacttgtcatggttaccgtttgaatcgaaaggctttatcagtaaaaattgatggaaagcatattgccgaaatttcagctttacccatcgatagtgccatggaatttttcggtaatttaaacttttcggagcaggatacagctgttgccactccaatcttaaaagaaatcaaggaccgtttgaatttcttacgtaacgtgggattagagtatctaactttgagtcgctcggctcgaacactttcaggtggggaagcccaacgcattcgtttggcgactcaaattggctcgaatttatctggtgtgctatatattttggatgaaccttcaattggtttacatcaaagggataacaatcgattaattagttcccttaaaaagatgcgggatttaggtaacacgctagtagttgttgaacatgatgaagatacgatgtgggctgctgattatcttattgatattggaccaggagctggcgaaaatggcggtgaagtcatggcagctggtactcctaagcaagtggctaaaagtcgtaaatcactgacggggaagtatctatccggaaagaaatttattccagttccagaaactaggcgtacaggtaatggtcaatctattaaattaaaaggggtacaagaaaataaccttaaaaatattgatgttgacttcccattaggtgaatttgtcgctgtaacgggagtttctggctcaggtaaatctacgctagtcaatatggttttaaaacgagttttggctcaaaaattaaaccataattctgaaaaaccaggtaaatataaatcggttagtggtattaaaaatattgaaaaagttatcgatattgaccaatctccaattggccggaccccacgaagtaatccggcaacttatacgagcgttttcgatgatataagaggcttatttgctcagactaatgaagctaaactccgaggatatacgaagggtcgttttagttttaacgtcaagggtggacgctgtgaagcatgtaagggtgacggaattctaaaaattgagatgaatttcttgccagatgtttacgttccttgtgaggtctgtcatggaacacgttataactcagaaacacttgaagttaagtacaaaggcaagacaattgctgatatcttggatatgacggtggaagaagcaacagatttctttgctcccatccctaagattgctcgtaaacttcaaaccattattgatgtaggattgggctacgtacatttaggacaatcagctactaccctatctggtggtgaagcgcaacgtatgaagttagcttccgaactacacaaaaaagcgaatggtaagaacttctatatcctagatgaaccaactactggtttgcatacagacgacatcagacgtttgttagatgtattacaacgtttggtagataatggtaatactgttttagtaatcgaacataatttagatgtaattaaaactgccgatcacttgattgatctgggtcctgaagggggcgctggtggtggacaagtggtggctgttggtacaccagaagccattgctgcggtacctgaaagctatactggtaaatatttgaaagaagctctagagcgtgctcaagaacttagtcagaaataatacaaaaggggcaatttgtgctcctttttatataacttaaaaaagacacgcccggatgtgttatactggagtagctacctttataggaggaattaataatgaatgaacgactacaatttgttgtggtaacaggaatgagcggggctggtaaaacagtcgcaatgcaaagctttgaagatttaggatttttctgtgtggataatatgccacctgctttattaccaaagttttgggaattaattaaagaaaatggaaaaattagcaaagtagcgttagtcgtagatttaagatcacgaggtttttatgatcaaatcttagggttacttactggtgaagaagaacaacataatattaaaacggacgttgtattcttagatgcgacggatgaagaactggttgctcgctataaggaaactcgtcgcgctcatccgttagcaatggatggacgggtagctgatggcgttcgtaaagaacgcgagcttttatcaccgattaaatcagaagcacaaattgttattgatacaactaatatgacacctcgtgagttacgaagtgatatttttggacacttctcaacgaataagacgattcctaagttccacattgaagttgtttcatttggctataaatatggtagtccaattgatgccgatatcattatggatgtccgctttttacctaatccatactatgttactgaattaaaaaataaaattggaacggatccagcagtttatgactatgtcatgaatcaaccggctaccgaagaattttatacggattacttaaaattattgatggatattatgccagggtatcaaaaggaaggtaaatctaacttaacgattgccatcggctgtactggtggtcaacatcgttcagttgctattgcagaacgtttggcaaaagatttatctaaaaaatatgtcacaaatatatcgcatcgagatgcgcataaacgaaaggaaacggtaaatcgatcatgaccagaaaaaaaggtcctaaaattgtcgtaattggtggcggcacgggactaccagttatccttaaagaattacaccaacgcaatgctgaaattactgcgattgtaacggtcgcagatgacggtggttcatcgggtatcatccgagattatgttaacgtagttccgccaggggatattcgaaatgtaatggtcgctttatctgacattgcccctgaatttaaagatatttttcaatatcgctttagaagtcaagataagtttcttgccggacatgctattggtaatttgattattgcggcgctttccgaaatgcgtggtgggattgatccagccattcgagaattatcagaaatgcttcaagttgagggccatgtttatcctgccagtgcacaacctttagtgttacatgctaaatttacggatggcacgctgttagcaggggaagctgaaatcacagcggctcataaagacattaaagaagtgtgggtgggtaacaatccatggagcgaaactaagaaaccccatgctgtaccggaagcactgcaggcgattgaagaagccgatgaaattattttagggcccggtagtctatttaccagtatcttgcccaacttaatgattgaagatattggacgcgctgtacttaaagcgaaagctgaaattgtttatatttgtaatattatgactcaaaagggtgaaactattaattttacagatgcggaacatgtacgaacattgaatcgacacttaggacaaaactttgtcgataccgtactcgttaataccgaaatcgtgccagaatcctacatggatttcaatcgctatgatgaagtttccaaacaagtagttcatgattttaagggattacgggaacagggtgcacgagtaatatcggacaatttcttattgttgagagatggtggagcgttccatgatgggcagaaagttgtagacgaattgatgaatgtttgtagcaaccccatcaagaagcgtgattaggaggttcagaatttgtcatacgcaagtgaagtaaaaaaagaactgacaagtttggaagttcacgaaaaaaatgctaaggcggaattgatggcgttaatccgaatgaacggtgcaattggtatcaataatcgtcagcttacattaaatacacaaactgaaaatccagccattgctagaagaatttattctttacttaaagaattttatcatttggaagcagaacttagtgttcgacggaagatgaaattgaagaagaataacttgtatatcgttcgtttacgcacgggcgttaaggagttattgaatgatttatcgattttaaaagatgattttcagattaacgaaaaagttccggaaggtttgttgaccgaagaatcagaattacggtcctatctacgaggagcctttctagctagtggatcggtaaataatccagaaactagccgttatcatttggaaatttattccctttatgaatcacacaaccaaatgattgctgattggattaataagtataatttgaatgctagaacgactgagcggcgtagtgggtatattgtttatttgaaggaagcagaacatattgctgattttctacaattaatcggagcaactaattcgatgctcaaatttgaagatgttcgaattatgcgtgatatgcggaattcggttaaccgtttggtcaactgtgagacggctaatttaaataaagttgctaatgcatcgatgaaacagattaacaacatccaatttattgatgaaacagtcggattaggcgaattaccacctaaattgcgtgaagttgctgaggctcgtttgattcatcgagaagttagtctcaaagaattgggtgaattagtacccggtggtccaatatctaaatcgggtattaaccatcgcctgagaaaaattaatcaatacgctgagaagctaagagcttaattaaatcaagaggatatcttcagaaatacttgaaggtgtcctcttttttacacagtgtatattgtaagggcttaatgtaattgtaatgtaaaaaattggaacaaattattatgctaatattgactacgatagatgaatgtcaactaggtaaacaaactaaaggggaatacgagtttatgaattctaaattacattacaaaatgtttaaagcgggtaaaaagtgggcctttgcaagtatcgcagctgccagtttagggatcattgctttagatgctaatgcaactaatgttcatgccgatagcaccgacaatgatgctactgatacggttgatggtagtacgactacttcacccgtaagcgaagcaagtgttacattaacgaagacttctttaccagctagttcagcagctagtgctagtgtggctagctcagcaacttcagcagttacaagtactgctacttccagtgctgtaagtaaatctgcaactaattcggtggtgacttcgagttcggctaagagtgcgacaagttcatctgctacatcaactgcaagctctagtgcaaagaaatcagttgctagttcagcggcttcatccgctagtgaaaaaaccgtttcaagcactgctaagagcgttgctaatagctcaagtgtagttaaaaatacaagttctagttctactaaaaactcaagtgcagctgtttcagtagttgcgcattcaaattcaagtgccgcttcttcgacagccagctccaaagctgctattaaaacgagctcagctgctagtgtaagttcaagtgcggtctctaaaacaagtagtgctgctactacttctaaaaataaggcggtagataagaaatcaacttcaaaggactatacgattgattatacgcatcaattaagtgatgacgagggtagtgatcagcaaactaaaaataacgtaatcattgcacacgccactggagtttatgcaccagctgaaaatgtagctatttttgaaaaacgtgaatgggacagcagcgaaagctatgttcaatatatcgttggtgatggtgggaaagtttatgcagttggacaagaaggatacgtcgcttggggcgcaggcgaatgggctaatgaaaatgctcctgttcaagttgagttagcacaaacatattctgatagccaatttaaaaaagattatcaaacttacgttaacctactaagggattctgctaagaaatggaatattccaaccagtctagacagtagtgaatatcgtggtattaaatctcatgtatggattactaatcatgtttggggaaaccatgtagacccttacggatatctttcgacccatggtatttcacaaactcaatttgcccatgatcttcaatatggatttggtagtagcagtagtgattcaagtaataatacatctaatgatagcgacaaaaataatgctaacaacagtaataaaaatgattcaaatagtaataaaaataattcaagcaagataaatattggcgataaagtaaccatcaagacaagtgctaagcattgggcaactggacaaacaatctatagtgccgttaagggtaagacttacaaggttatgcaaattaatggtaacaaattgctcttggacaaggttatcagttggattaacaagggtgacgttacggtgccagggtcttcatcatcaaatcaatccagttctaacaaaggtaacagtagtaatggtaataaaaataacagcagcaataagattggtgtaggttccaaagtaaccatcaataagaatgctaagcattgggcaacgggtcaatctatttacaatccagttaagggcaagacttacaaagttatccaggttaacggtagtaaattgcttttagacaaagttattagttggattaataaggcggatgtaacattagctggctcaaaatccaattcaggttcatcaaacaagaataacgcggcttccatgcataatgtgaatgttcatttaactaacaaacattggacaactgcacaaactaattttgtaaatggtattgcagcagatattgttaatgtatgtaatagcaataagctctatgcttccgtagctatggctcaagcagttttggaaagcgggtatggaacttcatcacttgctcaagaagcgcacaatttatttgggattaaggctgatagcacttggaaaggtgctacctatactaagagtactaaagaggttatcaatggtcgcacagttaccatcaatgcctcatttagaaaatatgcttctatcaaggattcaattgcagattacgctaagaaacttgaatcacgtgcacaatacgctaatgcatttgcaccaaaatcagctaactatgtggcttctattaaagctatcaaggctggtggttacgcaacttcaaccacttatgttggtagtataattaactgcatcaatagtaatggtttctttaaattagacggattaagcaaagcccttcatctttaagatttaattaggttaaaataggagactggaacatacaatctgtgttacagtctttttattatatggggaaaggatgaatggaagatgaaatattcagagtttcaatttgtacaactttgggatggaagattggggactattactaaagttttgccaagtggttatcttattgaagataattattgggattggttagcaagtaaaaatgaggaagatcctgaaaaatacatctatccgcatgctgacattgaaaagaatttctcagccctcgaagaggaaattgaaggcgaagcacaaattgccgaagaaattttcgaatttcgttacaaaatgatgaaaagtgcactaggaaaataaaaaaagacatcggaatttttccgatgtcttttttatgccactaattattttaagttagcatttttttccatgataccatcaatcaaaccgtattcaacggcgtcttgagctgatagatagttatcacgttcagtatcaatattaatcttttcaagaggttgtccagaattttcagctaaaatcgtattcaattctttacgagtcttcaagatttgttctgcagcaatctcaatttcagtttgttgaccttgagctccaccagaaggttgatggatcataacttctgaatgaggtagagcaaaacgtttaccctttgtaccagatgaagcaagcacactggccattgaagcagccattcccattacgattgtttgaacatcagatttaatgaagttcatggtatcgtaaatagctaaaccggcggtaacaactccaccaggagagttgatgtataggtaaatatccttttctgagtcttgtgcatcaaggaagagtagttgagagatgattgagtttgctaaatcatcgtcaataggacctgatagcatgatgattcgatcttttaatagtcgtgagtaaatatcataagcacgttcaccacgtgatgattgttcaataactgttgggaccaagttcataacttagtaacctcctttattatcgtaaaaaatttcctgttaaataactaacatggctatagtttatatcattggtcaaaaaaggtcaaatatttttgctctttaaaataaaaaacaacctagccggagaaaattttcgaccagattgcatatattgtctaatgtaccaggagacaatggttgtagctattgaataaatagtagtatataatgcagttgtaagcgaatttatgcataaattcgctaagtaatgcgccatgagggagtcgaaccctcagcttgagaaccggaatctcacgtgctatccattacactaacggcgcctaacaatttgattttacagtaggacagaagaaaaaacaagataattgcggagaattactatggcaataaaacaaggatttagtcaaaatcaaactcaacaacaaaatcaaatccaacgtttagcgatgacgcagaccctacaacagtcgattcagatgctgcaatataacgttgaagagcttcaaaattttctcaaacaaaaagaaatggataatccacttattacggttgaaatggctgctgaaaagccaactagtaagatttcaggtgattccgatcgacacgaggcatttatgaatcaaattgctagtgatacggaacaatcgctatttgactacttattagaccaggttcatttaactatgcgagatacaccattaagacgcctagtattgttgcttttagactatgttgacgataatgggtatttaggaatatccaatgaagcagtgattaaaaagaccggtgcagatgaaattgctgtgatcgatgcggtaactttactccaacagttggatccacctggagtgggggctcgctcgctccaagagtgtctaatgctacaaactgaaaatgatacattttctccagaacaagcttatttgattttggaagaatcttttgaagatttagtcaatcgtcaatgggataaaatcgctaaaaaatatgatattcaattgagtgatgtccaagcggtttttgattacgtcagaacattaacacctaaccccggagcaggatttggaaaacaagagcatagttacattatcccagatttaatctttagcattgaaaatgatgaacctcaattactacagtctaaggcttcacgtcctaaagtcagcttctcacaacattattttgaacaacttcaaaacgttgatgaagaggtcaaagcttatgtcacggagaagaagaaagaatacgactggatttcgaaaagtttaagtcaacgggaagataccattctcagagttggaaagattatctttgaaaagcaaagtgaattctttatgaatcaaagtaaagagctaaaaccgttgcttctaagagatgtcgcgaataaattacatttacatgaatcaacaatatctcgtgctgttaacggtaaatatattgcaaccccatttggtacgtttgaactgaaatcgttctttagtaatgctgttaatcgtgaaagtgatgtttcagcagatgcagcaaaagaaaagattaaaaaaattatcgatgaagaggataaaagaaaacctatttctgattcgaaaattgagaaaaatttaaaagaaagtgggattgcgatttcgcggagaaccgtcgccaaataccgcgaagccattgggattccatcttcttcaaaacgcaagcgatttgattaatttaaaaagccccaaataagttgagtttaaatttgcaaaaaagatgggggcttgttataatttaattcgtaagtgaggtatacaacaaaagttaattcttgagtttgtgtgccatttatttttaatttgttgggtcgttttgtggcactgctggacaaaacaagtcccacaacaggagataacatggatgataatgagatggatttattagaatctgttgttccaggtttgattggtgaatttctacagagatttgatatcttaaaatcaatcgatctgcttgctccggttgggagaagagttttatcggaacatctacatctcagcgaacgcgtgctaagatcacaaactgatgtgttaaaaacacaaggattgttgacgagttcgcaggctggaatgatgctttctgatgagggccggcgcgttatgaatggtctcgaacctgtagctaaccgattcttaggcttaactagccaagaaaagctattggcggaacgtttggacatcgaaagatgttttatcgttcggggagatcgtgctgacggagatgcggtcacaaaacaactcggaacaattttaaatgatgcacttgcaaaattgttgccagagggtaataatactatagtggtaatgggcggttcaaccatggcatcggttgccatgcagttgtcgtcagagctttcgaacaatcgaaagctaacctttgtaccgggtcgtggtggaattggtgaatcagttgataaacaagctaattcagttgcggcgttgatggctaagcgcactagaggtgaagccaagtcattatacatcccggaacaattgagtgagagcacttaccacccccttttaaatgaaccgactgtaaaacctgtgttggatttaattagtcacgcaggagttgctatccatggtattggtaaagctggcgatatggccagacgtcgaggagttaacgaagaaatcctaagttaccttcgaaaagccaaggctgtgggggaagcgtttggatctttctataatcgagaaggacgcatcctatatcaagttcatcgaattgggttacagctgaatgatgttcagcatttcaatcatgtattcgccgtggctagtggtcatgacaaggctcaggctattgagtcgtacatgaaaatcgcaccgcatcagacaattttaattactgatgaaggtgcagcaaacgcgattttaaaaaagtaaagccattgtgacttaactttttaaaataaattatttttttagattcctaaaggaggaaatcttacttatgactgtaaagattggtattaatggttttggccgtattggtcgtttagcattccgtcgtatccacgaattgggtgcaaaatcaaatgacatcgaagttgttgctatcaacgatttgacaagtcctgctttattagcacacttgcttaaatatgattcaacacatggaacttttgctggtgaagttagtgcaactgataactcaattatcgttgacggcaaagaataccgtgtatacgctgaaccaaaggctcaagatattccttgggttaaggaagacggtgttgacttcgtacttgaatgtacaggtttctacacatcaaaagaaaaatcacaagctcatttagatgctggtgcaaaacgtgtattggtttcagcacctgctggctcagatcttaagactgttgtttacaacgtaaacgatgatgttttaactgctgacgaccgtatcgtttcagctggttcatgtacaactaactgtcttgcaccaatggcttacttcttaaacgaagaattcggcgtacaaattggtacaatgacaacagttcatgcttacacaagtacacaaatgcttcttgacggacctgttcgtggtggaaacttccgtgctgcacgcgctgctgctgcaaacacaattcctcactcgactggtgctgctaaggctatcggtcttgttatcccagaattgaacggtaagttacaaggacatgcacaacgtgttagcgttgttgacggttcattgacagaacttgtttcaatccttgacaaggacgttacagttgaagaagttaatgctgctattaagaagcatacagaaggtaacgaatcattcggttggaacgaagacgaagttgtatcaagtgacatcattggcacaacatacggctcaatctttgacccaacacaaacagaagttactaaagctggcgacaagcaattagttaagactgttgcttggtacgacaacgaatacggcttcacttgccaaatggtacgtactttattgaaatttgctactctttaagattaattcttaaaaattgtagatttcaaaccgtctaatcggtctagggacggagggaggtcacttcctccgtccctttttttagaaaaaataatttattaatgatttaggaggaaattctcttggctaaattaactgtttcagatttagatgttaagaacaagaaagttttgatgcgcgttgactttaacgtgccagttaaaaatggtgtgattggtgatgacaaccgtgtcgttgctgctcttccaacaattaaatacattatcgaaaacggtggaaaggcaattcttttctctcacttaggtcgtatcaagactgaagaagacaaaaaagaattgactcttcgtccagttgctcaacgcctttcagatcttcttggcaaaccagttacatttgttcctgtaacacgcggtgcacaacttgaagatgctgttaatggcatgaacgacggcgatgtattattgttcgaaaacacacgttttgaagacttagatggcaagaaggaaagtaaaaacgatcctgaacttggcaaatactgggcatcacttggcgacatgttcgtaaacgatgctttcggtacagctcaccgtgcccacgcttcaaacgttggtgttgctgaagcaatgaaggctgacggcaagcaagttgctgctggtttccttatggaaaaagaaatcaagttcttgggtgaagctgttgacgaacctaagcatccatttgttgctattttaggtggcgcaaaggtttctgacaagattggtgtaattgatcacttacttaataaagctgacaaagttattattggtggtggtatgacatacacattctacgctgctaaaggcatgagcattggtaactcacttgttgaagctgacaagattgatgttgctaaagaaatccttgctaagggtggcgacaagattgtccttccttcagacagtatcgttgctgaaaaatttgataacgatgttcctaacaaagttgtcgaaggcgatattcctgatggttacatggctcttgatattggacctaagtcagttgcagaatttaaggatgtccttaaagatgctaagactgttgtatggaacggaccaatgggtgtattcgaaatgagcaactacgctaacggtacacttgaagttggtaagttcttaggtacattatcagacgctacaacaattgttggtggtggtgactcaactgctgctgttaagcaattaggcgttggcgaccaattgacacatatctcaactggtggtggagcttcacttgaataccttgaaggtaaagaacttcctggtatcgctgctatttcaaacaaataattaaagttgtagaaatcgaagaatcagttgattcttcttttctgctacataacctgtaattcggaaaggatgttttattttgcgtactccaattattgctggaaactggaaaatgaacaaaaacccccaagaaactcaagaattcttggatgctatcaaaggtaagttacctgatgcttctgaagtagaatcagttattgctgctcctgctatcgatttaagcactttagtagctttctcaaaagatgaacaactaaagactgctgctgaaaacagctacttcgaagacgaaggtgctttcactggcgaaacaagtcctaaggctttaaacgaaatgggcgttaactatgttgttatcggtcattcagaacgtcgtcaatacttcggtgaaactgacgaagatattaacaagaaggctaaggcaatcttcaacaacaacatgacaccaatcatttgctgtggagaaactcttgaacaacgtgaagctggcgaaactaacgaatgggttgctggtcaaatcacaaacgctcttaaagatttaactgcagaacaagttgctgcatcagtgatcgcttacgaaccaatctgggctatcggtactggtaagacagcttcaagtgatcaagctcaagaagtttgtcacgtaattcgtgaaacagttgctaagctttacgatcaaactgttgctgacaaagtacgtattcaatacggtggtagtgtaaaacctgctaacattgctgaattaatgggcaaagaagatattgatggtggacttgttggtggagcatcacttgatccagaatcattcctagaattagttacctataagggttaatataattaaggaaatataatataataatagttgaactgcgttaagcagatttaaaaatgtgaggagatatttaaaatgtcacttattactgatatttacgcacgcgaagtcctagactcacgtggtaacccaactgttgaagttgaagtttatactgaagatggtggtttcggtcgcggaatcgttccttctggtgcttcaactggtgaacacgaagctgttgaacttcgtgatggcgacaagaaccgtttctcaggaaaaggtgtagaaaaggctgttgctaacgttaatggtcctattgctaaagaaatcgttggttttgaagttacagaccaaatcgctatcgataaggcaatgattaaattagacggtactcctaacaagggtaagcttggtgctaacgctatcttaggtgtatcacttgctgttgctcgtgcagctgcagatgaactacaagttcctctatacaactacattggcggttcaaacgctcatgttcttccaacaccaatgatgaacgttatcaatggtggagctcactcagaaaacaaagtggacttccaagaattcatgatcatgcctgttggtgctccttctgttaaagaagctatccgtatgggttcagaaactttccatgctttgaagagtcttttgtcagctgatggcaaagctacttcagttggtgatgaaggtggatttgctcctgactttgctaacaatgaagaacctcttcaatacctaatcaaggctattgaaaaggctggttacaaaccaggtaaggacgttgctattgcagttgacgttgctgcttcagaactttggaacgacgaagacaagaagtacaagcttcgctggtcaactggtgaagaattcactactgaagaattcgttaagtaccttgaaggcttagtaaacaaatacccaatcatttctatcgaagatcctatcgatgaaaacaactgggacgactgggcaagcatcactaaagaacttggcaagaaagttcaacttgttggtgacgacttcttcgttacaaacacagaataccttgctaaaggtatcaagatgggtgctgctaacgcaatccttatcaaggttaaccaaatcggtactcttacagaaacaatggaatctatcgaaatggctaaagaagctggttacacagctatcgtttctcaccgttcaggtgaaacagaagacacaacaatcgctgacttagttgttgctacaaatgcaggtcaaattaagactggttcaatgagtcgtacagaccgtattgctaagtacaaccaattaatgcgtattgaagaccaacttgaaggcgttgcagaatacaagggtattaactcattctacaacctaagtgctgacgctcgcgaagaaatcagcaacaagtaattaaattaggtcaatcaaagaggcggacattttgtccgcctctttttttgttattgaattggaattcaggctcaaatatgttaaattagtactagaacttattaagaacatgaaggaggtcatcttgtgtattcacttctgatgacaattctattgattctgtcagtgtttataatcattgcggttatgatgcaaccggctaagactgacagcgcgatgtcttcattaacgggtggtgctggtgacctatttgcaaagcaaaaaccacgtggatttgaagcatttatgcaaaaagtaactgcagtcttgcttttcttgttttttgctgtcaccattgcaatggtttacgtatctgcacactagagagatcgtattgaacaaaaaaattgcatttagcaaattctgaaatttagatttcggaatcattaggaacggctaaagacgaaattagttttgtctttagcttttttatttaataaatacaaaaatatgaggtaagaaatggaaataaacaaattacaagctttaattattaattatctgcaacaacgaccaacccaaaagttaactgctgaggaactttttaagggtttaaatttagaaggggccagcgtgtttaacaccttagtcaaggaattggcattaatggaacgttctaaaaaagttgaaataacggaagatggcaaatttaaaattgctcgccctaaaaatcaattattagttcatggtgtgttccatgctaatgatcgtggtttcggatttgtttcagtagaagaggatgaaattcctgacatttatattagtgaagatcatacagcgtatgctttaaatatggatgaagttgatgtaaaaattactcgtccatctaagaagggtgatgatcgtggtccagaaggaattgttaagaaaattacaagtcgccactttacccaagcggtgggggtttttgaatttgctcctgaaccagagaagaatgttttaggtcatatcaatttgaaagacaagaaaatgtcttcatatcaattcgatgttctagaaggcggaattcaaccaactgacggttcagtgatcacggcacaagttgcgcaatatcctaagcctaattctcctaagttaattgccggggttgctgaaaagacggttggtcataaggatgatccaggagtggacatcttagaagtggtttatcaacatgagttaccaactgaatttccagatgatgtcaaagcagagattgcttcgattccagactatgtaacagatgcagagaaaaaaggacgcgttgatttaactaatgaagtagtggtcacaatcgatggggatgattccaaagattttgatgatgctgtaggtcttaaaaaactagataatggaaattaccatttattagttaacattgcggatgtttctcactatgttaaagaaggttctcctttagataaagaagcatatcgtcgaagtacaagtgtttacttgactgaccgagtaattccaatgttgccacgtaagctttctaacggaatttgttcattaaaccctaatgttgaacggctttcgatgacttgtgaaatggaaattacgcctgaaggagacgtagttaaccataagatttacccaagtgtaattgaatcagatgctcgaatgacatataacgatgttaataagattttggaatctaaagacgaaaaaactatggcacgttatgcaaaattagtgcctatgtttgaaatgatgggcgaacttcacaaaatcttgcttaagaagcgtaagcaacgtggagcaattgaatttagcgataaagaagcccaaatcatcgttgatgaaaccggacatccaattgacattaaattacggacgcgtgggacttcagaacgtatgattgaatcattcatgttggcagctaatgaaacggttgctgagcactactataaggctcatgtgccattcttatatcgtattcatgaaactcccgatagcgaaagaatgttaaccttctttgaattcctatctgtatttggacacgtagttaaaggaagcaccaaggatctgaagcctaagatgctgcaaagcgtgcttaagaagattgctgggactccagaagaagcaatgatttcagtaatgatgcttcgtagtatgcgccaagctaagtatgatgctcaatcattaggtcattttggattggctgctgagtattatacgcatttcacttcaccaattcgccgttatccggacttatttgtgcaccgcttaattcgtcattatgccgaaaatggtactggtgaagcagcacaagcgaaatatgttgaaagcattccagaaattgccgatcatacttccaagttagaacgtcgagcaatcgacacagaacgtgatgttgatggaatgaagaaggctgaatttatggctgaccatgtgggagaagaattccatgcggtagttagttcagtaatgaagtttggtttattcgttgaactggaaaatacggttgaaggactaattcatattagtaccatgaaggatgactactatgaatatgttgaaaaacagatggccttggttggacggaatacccaccgtaccttccaaattggtcaagaagttgagattaaattaatgcgagtggataaggatcaatccgaagttgattttgaattattgcatccagaaaaaacacctaagagtgatattcaacttccaccgcgtcaacaatttaaccgtggtccgcgtcgtaatggtcaaaagcctagtggaaagaacaacaataaatcaggaaatcgaaacggaaaaccattttacaaagataaaacggtcaagaagttttctaaaaatacttctcataagaaataagaggaggttatgttatggctaagaaaccaaagtccaatgataaagcacttgcccaaaataaaaaggcgcgtcatgattattccatattaagtacgatggaagcgggaatggttttaacggggacggaaattaaatccatcagagatcggcgagtaacgttaagagatggatatgtacagatccggcacggagaggccatcctcatgaacgttcaaattaatgaatatttacaaggaaaccaatttaaccatgatcctttccgtaaccgaaaacttttattgcataaaaaagaaattttgaagttacaagaagaaaccaaaaataagggaatcaccatcgtaccgttgaagatgtatctaaaaaatggttttgccaaagtcctaatcggagttgccaaaggtaaacacgaatacgataaacgtgaatcattaaagaagcgtgatcaacaacgggaaatcgatcgagccttaaagaatagataaaaagagattatccgctggataatctcttttttgttagatggattttttcaaatgttgataattatggtgagatacaacttgttcatgatcatttttgaagcctaaacgacgatataaacgttcagcattaggatttaaatcatcgactagtaaacctaattttttaagaccacgtttttgagcatattcaggtagagcattcagtagttgagttccaattcccatgttttggaacttgggattgactaccaatgaatctaggtaccattcgtcggtatccgcttctggatcttcgtaaattggttgggctggtagctttacttgatcaaagtgtttttggaactcttcatctaagatatcttcatgggcccctgggtagccataagccacgccagctacttcatcatgttcatttttagcaacaatgacgtctgcatgttctgcataagttggactcttaaaggtttcaataaagagcttggtaacctcgtttgcatcattatttaagtaaaatggtagttccatttcatctaagataatcttgagtaattcaatcaccgctggaatgtcggcagtggaagctttggttattttcatgtaaattctcctttaaaaaattgttataactggttgcgtcggaattgattttccaagtccgaactaatttaggttcgcgtagcggaggacgcttttgaatccatcgatctaaaatagccgctaagcaaataaagaggggaagatgttcctggtcaaaaacattcaattcaatataggcactaccattgatttgaactcggttaatttctagaatagttgaaattccgtggaaaactttaaaatgacaggttacagtatctccagcaatccaccaatgtaagttgtgaactaaaagaaatccacggataagaccgatgggagtggtaacagttcctaccttggtaccttgcaaaaagagttcaaatttaggcagtttaccaactgatacctgctttagttctgaaaccaattttccgtttaaatcataaaccgagagagcgtcatttttaatgccccatttaccgaccaaaagatatttggagttgtgcttttcatcgctgacaatggtagctcccttattttcgagtccttggctttttagataaaatctacgcatagcatagcctcgttttactgatggttttcatcaagttgctcaagaatggctttagcaaccccattttcattattagtaacggtcagatgattagcaagttttttaatttccggaatcgcattacccatggcgtaactaacaccagcgatttttaacatagaagcatcattcatattatcaccaatggtcattacttgtgacatgggaacgttcaattcatcagcaaagtgttgaaccgcaattcctttttgggcacggggattattgatttcgatgttattttcaaaagaagatgaaatggcaacatcgactttagcatgtaaagcttcacgaacgggttgcaaccccttttgtccattttcaccaaaagccacaagtttaagtacttgaatcttcggatcgtcaattaaaacttggtaatcatccacgtagcgaatgttcattagttccacccgtgctgatgacatagcgactgctaatttgaaaggtgtgtctgggttaaccgtttcaagcaaatgagctacggtttgaattcgacgagtgcgactattagaaacgacgccttggttagttgtaatttcatagtaaagtccggctttttctagttgatgcatgatcaagacggctgatggcttagtaatgggaaccatatctaaagctttaccatcgacgtcgaaaacagcggctccgtttaaagtaattagtgggaccgatagtccgtatgcttcaagcaaaggtttggcttcacgatattcacgaccagtggccactgcaaaatgaaccccagcagcttgggcctttttaatagcatctgcgttggtacttgaaatctgcatttcttcgttaagaagtgttccatccatatctgaagcgataattgaaatcatttataagcacatccaatccatgtatttatgttaattctaacatgacatagctttttttttactaaatcagttagaatagaagtaataaaattgtattaaggagttacgaaatgaaaaaaataatccataacgattggcaagatgttttacaaggtgaattcgaacaagcatattatgctaaattgcatgagtttttgaaacatgaatatgctactcaaaatattcatcctgacatgtaccatatttttcaagcctttgaatggactcctttttcaaaagtaaaggtggtaatcttggggcaagatccatatcatggacaaaatcaagcgcacggactgagtttttcagtgcaacctggggtgcaaattccaccatcgttacaaaatatctacaaagaactccaaagtgatttgggaattgttccagtccaacacggttatctaaaaaagtgggcagaccaaggagtgctacttttgaattctgtgttgaccgttcgtgacggacaagcttattcccatcaagggcatggttgggaacggttgactgacacggcgattcaggccttatcggaaagagagcagcccgttgtgtttattttatggggaaaagcggcccgcgacaagattaagttaattgatcaatcccgcaatattattattcaatcagcccatcccagtcccttatcggcataccggggcttctttggttcaaagccattttcaaaaaccaacgaagcacttgaagcgatgggagagacaccaattgactggcagttgccaacggaagttttggaggaaaaataatcatggaaacctatcaactaaatgacgaagccgaaacgattaaatttggcaaaattatcggggaattactggaagctaacgacgtggtcttattagatggtgatttaggagccggaaaaacgacactgacaaaaggcattgctcaagcacttggaattcggcgctacgtgaagagtcccacctataccattgtgcatgagtaccatgatggtaatatgccattatttcatatcgatgcatatcgtcttgaagaagacggtgcgggagatattggaattgacgaatactttgaaagtgatggagtgaccgtggtggaatggtcacagtatattaaatcgtatttgccagatcaatttttaagggttattttagatcgcaatcataacaataccaaacgttttctaactttggagcctaacggtgaacattatcaaaaaatcgaagaagcaattgaggaaaatatcaatggccgatgaagttagttttgttgaggggcaagctgaggatgcacaagggattgttcaactaattcaaaaattggaatctgaaacaacttccattgaatttgatgatgcaatttctaagttaagtctagaacaaattggtgaaaatctaaatttgatccaacaaagcccattgaattttcttttaattgctaagttgggggagacgccgattggcattgtgaccctaatcgaaactgatgaagtgaagcatcgggctgaattaggcgttggtgtcttaaaagactactggcataacgggattgggacaatgttagtcgatgaagctttatactgggcgaagcaatttagctggttagagcaagtttggctagcagttttggataataatcagtatgctattcaaatttaccaaaacctaggttttcaaactaaaacgcccccaaccatggatggtcaggggcgtcaaattataaaaatggaattatcccttacttaatctgacgaataaaactagctaaggcatcggctccaaattgatgttcttgatgtaataagatattcgcacaggcacggctatcatccagtgcattatgatggtgctgcaaatcaattccaagattatcacaaatcgtattaagtttatgattggtgtaatctggatagaagcttttggaagttcgtaaagtatctagtgtttgatatggtagtcgattaatttgataacgttctaaagtttttttaaggacactattatcaaaagttgcattgtgggccacaaccagtttgtcgggtgtaaagaactgtttaacgacgggccagagttctggaaatgtgggtgcatcactcacatcggcttgatgaatgccatgaacttggacattgcgccaattaaattcagtttcagggttaattaatgagtaaagttcgtctgtaatgacatcattttgaacaacagtcagtgcaattgaacaggcgcttgcacgagtaggagctgctgtttcaaagtccattgcaataaagttcaattgaatcactttcctttattgatttaacctatagtttaacgaataaaagtgagcgagtaaaggagctaatgtaagatgattaaagttggagtgatcggattaggaaatattgctcaaaaagcctatttaccggtgtatagtgagttgcaagatcgttttgaatggcatttaagtagtcgtaatgcggagaaattggctcatattcaaaaacaatttggattccaatatggatcaactaattcagatgagctaataacagagggagtagaagcagtctttgtgcacacaccaactgctacccactatgccattattaagaaatttttggaaaataaaattaatgtctttgtggataaaccagtatcagaaaatatagatgaagttcgagaattgtatcgtctcgctgaaaaacaaggagttttattaacctgtggatttaatcgccggtttgtgccttttcatcaacaattagctcaattaccagcgaagcatttagttacggtaactaaaactcgtgaattagagcagcaaaatccgttatttgcaatttatgacttaatgattcacgtaatcgataccacgcaattcttaatgggttcaggaaaggtagaatttgtcgacggtcaactgatccaacacgacggtaatttgattttagcgcgaattaatcttcgcaagggagatatgttaggaacagcaatgattgatatgcaaacccaaactaatagcgagatggcccaagtggttagtcaaagagggatttccactgtggataacttaagttccttaacgcttcaaaaagaggggattaaacattatcaacaggctcctgattggcagactaacttgaaaactaggggatttgacccgttagtgcgaagctttttaacagcacttgaaaagcacgccgaaaatccagtttcaccagcatcagcaatcctttcacacgagttgtgcacgcgtttaataagccaaggtaaagtgatagaatagactaagagattttaagatgaaaagaaaaaagtaagaggggaaagtatgatgggtcaatcaatagctgatgcatttccagaggttcaagtgttagagcatgagcctttgtcaaaatacaccaatacccaaactggtggtccagctgatttgttggtatttccagagtcagtaacagaaaccaaacgactagtactttgggcaaaagaaacggatacgccattgaccattattggtaatgcaagtaatttaattgtgcgagatggtggtattcgagggttaacgttaattttaactaaaatggatgacatccaagtcaatggaaatgaagtggttgcggaagcaggtgcggcactgattcagaccacggaagtagcctaccaagcaggattaacgggccttgaatttgcagctggtattcctggatcaatcgggggcgcagtctttatgaatgcgggtgcctatgatggtgagattagtgaagtagttactagcgcagaaattttgacgagagatggcgagattaaaaatttaaataaccatgaactcgatttcggttaccgccatagtagtgtgcaagattatcaagatgttgtgctttcggcaacctttaagttacgttcaggggatgctaacaaaattcgagctcggatggacgaactgaaccgtttgcgagcttcgaaacaaccccttgaatatccatcatgtgggagtgtttttaaacgaccaacaggctactttactggaaaattaattcatgaggcaggtcttcaaggctttacagtggggggcgcacaggtttcaatgaaacatgcgggcttcatcattaacgttggaggagccaccgcaacagattacatggatgtgattcatcatgttcaagcaaccgtcttgaaacaatttggagtaacgctagaaaccgaagttcgaattatcggtgaagagaaataattagttggtatatattagaagagtttagaaaaataatttgattttctaaactcttctttgttcgaaaagaccataaagaacggcaggtccatggtataatgggcgttgaataaaatttggagggacggttatggatataaattggtcccaactattaacatggagtaacctcatcaatttaatcgatataattgtggtttggtttgtaatttacgagctaattatgttacttcgaggaaccaaggcggtacagctattccgtggaataattgtaatcgtagttattatggttggtagttggtatattggattaagtaccgtgtattggatcatgaaccaagtcatcaactggggcgtaattgccatggtgattatctttcagccggagattcgacggggattagaacatctcggtcgaggttcgatttttgctaagaatcattcacaaaatgaagccgaagaaagcttgatcaaagctttggataaagcgattcaatacatggctaagcggcgaattggggctttaatatcaattcaaatggatacagggctagatgactatattgaaacggggattccattagacgcggatgtttcgggagaactactaattaatatttttattccgaatacccctttgcatgatggggcagttattatcaaaaatgataaaattgcggtagcagcggcctacttaccattgtcacaaagtaacttaattccaaaagaattaggaacgcgtcatcgagcggcggtggggatgagtgaagttaccgatgctcttaccattgttgtttcagaagaaactggtgaagtttctattatgaaagatggtgaattaattcgcggaatgacacaagagtcatatctaaaatatttccgtacgcaattaattacggccgatgaaggaccgacaccattctttgcttctgttacagaaaatatttcgtcgttctttaaaggaaaaagggggcgacactaagtgaaaaagctttttacacaaaacttaggatatcgcctgattgcgctagtgttagccgtcctactttttgcatacgtaaagacagatcatttaaccgcaacccgcacttcgggaggcgattctaatcaaaataattcggctttgatgtcgactaagacggctactatcaccatgccggtcgacttggatgtcaatacttctaaatatgtagtgagcggttatcgagagaacgtaaaggtgactttgtctggaaccagtgcgctggtaacgaccttaactaacacgcgtaatttcaaggtgtacttggacttgcaagattacaaggctggaaaatatacagttaagtataaagttacgggtctgggaaaggatattaaatataagattgatcccgaattagctaagatttcgattgctagacgacgaactaaaaactttgaaattcgatatcgttacgataccaatatgatcaaagaaggctacaccatgggaaatgttaaatcctcaactacggaggttcaggccacaggttcagctacagatattgaacgcatttctcaagtagtcgcagatgttaatgttcctagcaacacaacggaagatatttctgctcgagcagtattgcaagctttagacgtaaacggtaacattgtaaacgtggtgttaacgcctcaatcggtaaatgttaccattccagttacgaaagtagcttctaaagcaaaaagttcagcttcaactagcagttcaagcagctctaaatcaagctcaggagaatctagttcagatgcttccagtgccacggatgaatctgcccagtccgattcaaatgcatccactaattcttcagctcaaacgacctcagatagtgcaacttccgacagtacaagcacatctgatgctagcggaaacacagatacacaggtgaattaacaaaggagattattaacaatgaaattaaagtattttggtactgacggagttcgaggaattgcaaatgaaacattgactccagaattagcgtttcaattaggccgtgctggtggttatgttttaactaagcatgctaaagatgatgaacaaccacgggttttagtttcaagagatacccgaatttcaggacaattgttaaaacatgcattgatctcaggcttactttcagtcggcattgaagttatggatatgggaattgttacaactcctggtgtggcttatcttgttcgtaaacaagaagctgatgctggtgtaatgattactgcttcacataatccggttcaagataacggaatcaagttctttggttcagatggttacaagttatcagatgaacttgaagctgaaatcgaagtacttttagatgctgataaagacaacttacctcgtccttcatctactggactaggttcagtgactgattatccagaaggtggattaaactatacggcctttcttgaacaaactattcccgatgacttggaaggtttgcatatcgcaattgatgctgctaatggagcaaccagtagctacgtttcacaaatatttgcggacttaaatactgagtttgatacgatggcaacaaatccagatggtttgaacatcaacgctggagttggttctactcatcctgaaggattggctaagtttgtggtcgaaaaaggcgctgatatgggagttgcttttgatggcgatggagaccgttgtattgccgttgatgaattaggtaatatcgttgatggtgacaagattatgtatatctgtggtaaattcttgagcgaacgcggacgtttgaaagacgatactgtggttacaaccgtgatgagtaatctaggactatataaggctctagaagctaatgatatgcactcggttaagacccaagttggtgaccgctatgtggttgaagaaatgcttaaagacggatataaccttggtggtgaacagtccggacacattgtcttcttagaccacaatactactggagatggtatgttaaccgccattcaattgatgtacgtagttaaacaaactggtaaaaagttgtctgagttagctgctgatgtgacaacttaccctcaaaaattagttaacgttcgagtacaagataagaagctagcacttgaaaatcaagcaattaaagatatcattgaaaaagttgaaaatgaaatgaacggcgaaggtcgagttctagtgcgcccttcagggactgaagacctacttcgtattatggccgaagctcctacaaaagaagcagttggtcaatatgttgatcgaattgttgctgtagttcaaagtgaagttggcgtggattaattagttgaattaaacttctacaactgaataaatttaaaaaactatgctattttgcaaaaaatggcatagtttttttatacgcgaaaagcattgctactatacctatttcggcatttgatatataccaattttaaatattaacgtttgacaattatataaaaccgttatatattaataatcgttatatataccaattttaaaaatttaaatatattaatttagaggtgcaagtagtatgtgtggaattgtaggagttactggaagagctgatacaaccaatctattagtaaatggacttaaaaaacttgaatatcgtggatatgattctgcgggaatttatgtcagcaatgctaatggtgaagatcatctggttaaagctcaaggtaagattaaaaatcttgaggaaaaaattacgaatgatgtcatgggaaccacaggaattggccacacacgctgggcaacacatggaataccaagtattgaaaatgctcaccctcatttttcagaagaccaccgtttttacttagttcacaacggggtaattcaaaatttcaaagaacttaaaaaagactatttatctgaagttactttccaaagcgatacggatacggaggttgtggttcaacttatcgatcgttttgctaaagcagggatggatacggaacaagcttttaaaaaagcaattagtttattaaaagattcatcatatgcctttgttttgatggaccgtcaattaccagaaaccttattcgtagctaagaacaagagtcctttgttaatcggagtgggcgaagacttcaatgtagtttgcagtgatgcattggcaatgattaacgtgactaaccaatttgttgaattgcacgacggggaggtagttaagattacgcctcaaagcatttcaattagtaatctagccggcgagaggatcgaccgtgctcctttcactattgatattgatcaagctgaagcggataaaggaacttacccatactacatgcttaaagaagttgatgaacaacctgctgtaatccgtcgtatcgaagctaaatatctagatcacgccggcaatattcactttgatcaagctttgttagatcaaattaatcaagcttctaaactttacatcgttggggctggaaccagttatcatgctggattagtgggtaagaagttatttgagaagtttaccaaaactcctacggaagtggtattagcttctgaatttgcttacgacgatcctatcattgaagatcaagccttctttatcttcttgagtcaaagtggagagactgctgatagtcgtcaagttttagttcgagtaaacgatgaatggcaaaaacccagcctaacaattactaacgtcgctaactcaacgttggctcgtgaagcggacttctcagctacgctggaagcgggtcctgaaattgccgttgcttcaactaaagcatatacagcgcaaatcgcagtggaagctttgttagcagtagcaatgggacgtgaaaaggctaattctacagctgtcaatttcgatattacgggacaattgagtaaggttgctaatgccattcaaaccgtggtcgatgagaagggtaagattgaaaagttagctctagcaactttacgagaaacgcgcaatgcgttttatattggacgaggtttggattataatgttgccttggaatcttctttgaaactaaaagaaatttcttatatccaagctgaaggttttgcttctggtgaattaaagcatggtacgattgctttgattgaagatggaacgccggtaattggaattattacgcaatctaagacggcggatcatacgcgtagtaatcttcaagaagttctttctcgtggtgctaacgtcatcaccatggttagtgaagatttggctaattctacagatgatatcttacttccagtagtggacgaaatgttgatgccattggttagtgtgatagctgctcaattgttagcttattatgctagtttgcagcgtggatataacgtagaccaaccacgtaatttagctaagagtgtcacggtcgaataaaagttaatatctaaaataagcggtacaggtgctaaaatgtatcgctatttttttggataaattgctaaacagtattgacactcatagttgtaagcgttatcattgttcgtgtaaggtagtggcgcatctcctacctgtacaatcaattctctttctctcttatgctggatccgactatcaaaaggtcaggatccttttttgttgtctaaagtgtcactagacacaacctcctacggcaaactatactagtagaagtggaggcagagcaatgaagagtaatgaaacatttacgctaatccaagagattacgcgcttagacggaactaaatatattgaaattggaaatatgatgatgaatggtcgggctgaattagccgccgaacgtggttatattaaatctgtccgaattttgcaattaaatatctcacattcccaacatgttattaattacgaaaagtatattggggagcgctacgagatgccggatgagtccatgacggcttgggaagaatggcaaaaagacgatcggattatgaaagaatttaatgcgatccttcatgaaaatcatattagtggctaaatcataaaaaggtcggtgagctaaaactgcaactcagcaggagcgcgaagccgaccttttattttagtaatagtaaataaaaattaacggtgcaaaatgttcgcattatgacggataaagtgctattatattcatgaatttaaatataagaatactgtacaaggtttgagcacaggagggtacatattatggaaaaagcatatatgatcggtactggaattgccaatttagcagcaggtatttatttgattcgcgatggtgggtggtctggtaaccagattacgatgtttggtttagaaaaacatggtgccaatgatggggccgccgtcgccgactatgagcaagaatatggaaatcaaagtctgtctaacaaccgaggctatttagccaagggtggacggatgttaaacgaagaaacttacgaaaatctctgggacattttgcggagtgtcccatctttggacaatccgggccaatcggttacggatgatatattgaatttcgaccatgcacatcccactcatgatgttgccagattgatggataagaagaatggaattcgtaacaatggtggagcagacgactataatcggatgcagtttaataataaagatcgctacttactatctaaattaatgatgatgccagagagtaaggaagataaattaaacgatattagcattgcagaatggttcgctgaaagccctcatattttttcaactaacttctggtatatgtgggaaactacttttgccttcaagaaggaaagctcggccatggagcttcggcgctatatgaatcggatgattctagaattcagtcgaatcaacactttggaaggggtaactcgtacaccatacaatcagtttgaaagtattatcttacctatgagaaaataccttgcggatcaaggcgttgaatttattaataaccgaaaaattacggcatttaacttcaaagacactccgctccgtgatgatattatcgttacgggacttgaatacgaagattttgagagcggtgaaactggaaaaatcgaagttgatgaaaatgatttagtatttgatattaatggagcaattacggatagttcatcaatgggtgatttcaacacgccagttaaagaaaatatggaatacgctccaagtgcagccctttggaaacaagctacagaacatttttataaccttggaaatcctgataaattctttaatgatcgagcccaaagtgaatggatgagtttcacggttactactaataaccactacttggtaaatgaaattagtcgaattacccaacaagaaccggggaatgcgctaaatacttgggtagatagtaacaacctcctatccattgtggtgcatcaccaacctcatttccatgcccaaaaggaaaatgaaacggtcttctggggttacttcatgttcccacgtaaaaatggtgattatgttgataaaccagtgattgaaatgacgggtaaagaaatgcttcaagaacttctaggacatctatcagaagttgaccgagcagctgataacatcatcaatcatgaagaagaaatcatggatagtatcgtgaatgttattccagtttacatgccatatgctagtgctttgttcaaccaacgggcagtgggagatcgtccagacgttgtaccaaagaactctaagaacttggcttttgttagtcaatttgctgaaatgccatttgatatggtctttacggaacaatactcaattagagccgctcaaaaggcggtttaccacttcatgggtattccagaatcacaaatgacgccggttcatcactatgaaaaagatccaaaagtcttgctaaaagcaactaagactatgttcagatgaaaataaataaatatataaataaaagtaccgcagaaaaatttaattttctacggtacttttttatttgaggattttttagttatgtgaaaaataatattaaacgtatttttgaggaacagttttattatgcacagctgtagaaaaatcagtgaaaattaattttgataaatctatacctttagatttagaaatataccatgccagtagttggaaaactgtagaacttataaaaggtactttatattcatcttcaatattaattaaatctagttgcttttcatcttcagatgtttcctctctaaaattgatagtataaaggttagatacgtatttcttttcatatgtttttagagataactctttttcatatatacttttttgtgagttggtttcaatgaaaaaaatataatgatctttattaacttctagatatggtccatgcatgaaagcttctaattcaaatccctgcgagggtactctaacaacttcagagaattttgttgccatctctgagcaagtaccaacacttggtccgtatgcgattgaagtgaattgtgtagccttagtaagagaatctatatgttgcttaataaatgattcagttttatttataacattatctatattcaaagctaatttctttaaatcttgtatttcatggagctcttgctctgaagtaataacatgattaactgcggcaattcgtatggctaggagcatcatatttaagacagtagccgtgaatcctaaagtaacgtaacccacgtgttctctaccaattaatatatctaaaattgtgtctgtttcttcagaaatttctgttttaggtagactagtaacaccaattgagaagacaggatgatcttgtttaactttttttagtgcctcaatggttgcggtactttgtccgctttgggaaataccaattacagcatctatgtgtttatcaattttttcatagtgtgaatagttatatggttcttgaatttccatttgaatatctgttattttttcaaaataatatttagaacttaaagctgcattatagctggaaccagttgccaatactaaaattttattaacatctttaggcattttgttgagagctttatcaatatttaatggatattgatctagaattgagagcattttagcttgttcagagtatatataagttaacattgttggtttatccattgttgatctccttaaatatgaaagtattgaattaagaaattagctataccatcctctaaattagaatcagtaacatggttcgcatatttttttacagtttcggggctattgcccatcgccacgctaataccagattgttgaaacatttctatatcatttaatccatcgccaaaagatatagttctactagatggaatattaaatttttgttggatagattttattgcagttgatttatttatatttttaggtattaattctatgttattggtattagattatgaaatatctaaatttttaatacgtgataatttagctgttatctgttttaaatgtgaattaggtgtatcaaagataataatcccgttcaagaattttttattagtagcgtcagttatacgaatatagtcgttaggattaggactagctattcggttctgatcgctatttttaaaataatgggggagatcttttgtataaaaaacgtgatgatcatcaaaaaagaaagcgcttaaattaaactgattacttatcgatataatatcttttacagcttctttgctgagataagtaaggtatgttttcttatctaaagaatagatgcacccattggatgcgataattcccaaagaacgatcgatatcattacgtattacggaggcagatagaaacattcggcctgtagagatataaaattgaacatcctttttttgaagcgattttattgtatctatggttttgttagaaacagtttgctgttcgtcgattaaagtaccgtcaatatccataaaaactaaatattttttttgcaatataattcctcctagttttgtttaaattttgtaccgcatgattctctaattattaatttaggatatggaataggtagatgtggtaatgtttcatgctcaatcaaatttaacaattgctgtaaagctgctaaacctaattgattattgttatgatcaatcgtagtcagccttggaatagtaaattcactattaggaaataaatcacaacttgcaagagcaacatcctttggaacttctaagttgtgatctttaagcgctcttatagcacctattgctacagcatcgttgatagtgactagagcttgggggagagagtctgtactaattaatttttcaatcgcgttatatccatcttgtacatagtaatcatttaaaattacatatttttcttgaaaagttgaatacatggatagcgtttctttaaagccattaaaacgttcttttgttatttttacatcgggtctacccccaataaacccaatttttttataaccattagcaagtaaatgttgtgtgatcatcgtgccgcttaatttttgatgtctttcaataaagacggaattaattgaactatcagtttgtgagacgactactgtgggaatattttttgaaagatcgtttagttcagtagcgtattcagggttaatatcaattttatctacttccccacctaagattattaccccatctacatgtttttctttcacaatattaaaggtttttatctcggcttttaaattcgtaatagtttcttcagcagtcatagtatttagaagcaagatagaatagttctgttttatacaaatttcctcaatttgagaaactaatgaaataaaatatggattattaacgtctgacacaattaacgcgatggtattagttttttttgaaaccatactgcgagcaatcatgctaggttgaaaattattctgatcaattattgtttgtattctttttctagtattttcagagacatttttactattattgataactcttgatactgttgaaacagatgtgtttgcaagcttcgctatttctttaattgttaaattgttctgcatgtaagttacactcctatagttcttgatggtaacttaattgtaggtgatatctttgtatttaacaatacttttttggtaacgttaccaaaaaatgtgttgacatgctttttcttttattataacattctggtgtggtgataacgttttcaataacaatggtaaccttaccaaaggagataaaatatgtcaaacaaagtaaaaacagtactctccgtagatctcggtggtacaaagctattgattggagaagttacaaaggatggagaaattctgaataagaaaaagtttttctcagatgtaacaagtcaagagagggctttaaattctataaaggaagctatagtcacatattggaacaatggatgtattggagaagttattgctataggaatttcagcagtcggtcgtataaatatacaagatgcgacatggtatgaaattaatccaaaaataagtgagccaatcaatttacgtacggaattgaaagatataactaaattaccaatttttgcagctaacgatgtcaattgcgcaacaattgctgaaaaaattttaggagatggtaaaaacgtagatgattttatatatatcaactttgggacaggtatcgcagctggaatagtccaaggaaagaaacttttatttggttcaacttataattctggagaagtggggcatatggtagttgactatgatagtcctacacaatgcatatgcggacgttatggatgcgtcgaaccgctggcatcgggattgggtatctcggaaagagcaaaagagttaattgataaatacccgtctacaaatcttaaggaagatcaaaatggtaggataggattgccagagctaataaaagcttatgaggataatgatcccattgcccaaacggttttgaatcgtgctacgcaagctgccgcctgcttgataatgaatttagtgtatactacagatcctaaaaaagtgattttaggaggaggaatgttaaatggtggatggttcatcaaacatataaaagagtatctaaacgatgaggccatgagatttgttacagatggtttagaagtaacaaatttaaatccgaatgaaatagctttgaaaggagccgctatgttagcactaaaggagggaaaggtttgaataaaaatataacggatattcttaaaataacagagaatctacataaacccattccactgaatgaagaaaacagtttagaaaaatttacgaatacaaaaaaaatccaaagaagaataccgattgaggctacttcacaaaagaaatggcttggtctaggacgtggggatgttagaaccaccgactcacgtaaaattaatataaaagcaaaagctagatatgattcgtgggatattggtgatccaagtgatggagattatgtagggtttggaaaaactaaagcatatatggaaatgaatcatgaagattggcaatcatatgatttgttatctttcgaaataaaatcaaactgtaaaaatattattaatccaaatattactattgaactaaaaaatgatggtgaaattaaggtgccggataaatatgaacgtgagggctatcatagtgttaatcttcacgataaagaattgcaaaccattaaattaaatcttaacggatttccacgagattctatcacgaaactaggttttgtaattgaaagtaatggtacctatagcaggaccgaaggagaaattaacttcgaaatagcaaatgttttcctagaaaaaagtgattcaactgatttaatcgaaggttggagacctaaaaaagataatattattttttctcatgaaggataccaaacagactcacccaaactggcatttacatcggggctgaaagcggacaatttttctattgtaaaaaacgatggtgaaacggtgtttacttcaaaaattagcaatgtaaaaacgaatgtaggtgaatataatatagccgatttttcaaattttaaaatgaatggcacatatcacattaagatcggtaatttagaaactgaaaactttaaaatcacgaacgataaagaattatggatgggctcatctgtaaaggcgcttaattttatattctccgaaagatgtggatatcctgttccaaatattcacggcgtttgccatgaagatgttgtagccttacataaaggaacaaagatgattttcaatggtggttggcatgatgcaggtgatttgtcgcagcaattaattcaaactgcggaagtcacgcaatcaatttttgaattagcagaacaatataaaaatatagatcaaaccttatttgataggtttattgaagaagggaagtggggcattgattttattctgaaaacagattttggcgagggataccatgcaactagcgctggagtatcaaggtggacggataatttacaagggaatatggatgatgcttctgctcgagtacataataccccttacgaaaattacattctatcaggtgtgtttatgcgaatttctaaggtgattggagcaaaagattctatgtataacacacttataagaagagcggaaaaatactatagatttgcagaacgcgaatttagtaaattgggatttaaaactactccaataatgtgggaacatacattaaatacatcaaaagcaacatatttggcaacaatggtatggtcaggtactttagtaaaccgggttttaaaagatcaaaaaattgagcagaatattaaatctcagatgcggcaactaatactttgccaagaaacagacggtattaaattagataacggccatattttaaaaggtatgttttatagggatgagacacataacgttttgcaacattttaaccatcaatcgcgtgaacattacttcgcacaagcatttgaagcaattataacaacatataaagatgacgaggaattttcaacgtgggttaactcagcaaaagagtatgcgaattatttattatttttacagaaatatacttatccatatactatgcatgctgatggtatatataaagaaaaggaatatacagataaagcaagttttgatgtccaacatttactggttgatagttccgctaaaaatgaatattcaattcaattacaaaaaggcgaaaaagtggctaatggcttttacgttaagaagtttccagtgtggttctcttttagaggaaataatggagtaattctttctgctgctaaatctgctggtattttaggaaatttattaaataaaaaagaattaattaatgttgctagaggacaactgcaatggattattgggcaaaatccatttgaccaatctatgatgtatggggaaggttatcgttatgctcagcagtattcggtttcttctggggaaattgttggtgaaattccagtaggaatcgagacaaatgaaaatacagatgtgccatactggccattctttaataacgcaacctataaggaagtctggataggaaacgttggtaagtagttaagtgttattgcagaagttattaaatataaatagtggttttatcgattttattgttttttatgaattttttcaatgaaaaggagaaaaaagtgaataatacatttgttactaaactgacgatgattgctggaaaaatatctaataataaatatattgcagctattcgtgatgcatttgctaatacaattccgattactattacagcagctttttttctattagttaataatgtacttctagatccaaagactggatttataaaaaatatgcctggtgctgattttataaggaatgttggaacgcaagcatataatggaacactaggaatattaggactactagttacctttatgataggtgctaaactagctaaggaatttaaatttgatgaagttattgccggaatagtatctgtaggttcgttcattgctttgattcctaacgttattactactgctacaacaacaggaagtaatgtaaaaatcacagcagctttaactcaagtacagactagtgcatcttcgatgattttggggattttagctgcactaataggtacacgattattaattatgtttaatacagtggacagattaaaaataagaatgccggaatccgtgccaccgggggtagctaaagcatttaatgctttattcccttcttttattactatcacaatcttctcaattattgaagaaactacgcttactctaaccggaatgccagtacctgatttgatttctaagttattacaggcacctttagttggcggttttcaaaccctaccaggtattttactatatgtatttttgtctacttcagtgtttatctttggtattaatggagctttcgtttttggtgcaatttctgaaccaatcctattgtcagcactacaacagaatattgatgctattaaattaggacattcagtcccaaatatggtgacccaacctttcttggatgcctttgtatacatgggcggaggaggaacgatgatttgtttggttattgccttactaattttttcgaaacgtccagatgaacgtcttatttcaaaaattggtggtgtccctagtttatttaatattagtgaaccaattatgtttggtttacctattgttttcaaccctatgtatgctatcccattcattgttacacctatggtatcgactacaattgcatatatctgtacgagtctgcattggattaaccctacgtatatatttatcccttgggtaacacctccgattatttctggctatttagctacttcaggtgatatacgtgcatcgattatgcaagctgtaattactgttatcggggttcttatatacgcaccatttgtattagcttcaaatagattacagaaaaacaaggagtaactcgttatggctgaaaaaacaattatgttagtatgtgctgcagggatgtcaacaagtttattagtttcaaaaatgcaaaaagctgctgaagctgaaggtgtagatgcagaaatcttcgcaacagctgcatcagatgcagataataaattggctgaaaagaatcctgatattttaatgcttggacctcaagttcgttaccttgaaggtaatttcaaagaaaaattggatattccggtagaagtaattaacatgcaagattacggcatgatgaatggtgaaaaggtattgaaggaagctctaacatcaatgggtgtttaggtttaattgggttttgaattaaaagcgcctttgttttttatataaataaatttaaggagcgtaacaatggatggacaagaacaaaatctagaagtaatcatgggactaattattaacggtggtaacgcaaagagctctgcatttgaagccatcaacgctgctaaagcaggagactttgaaaaagcagatgaaaaattaaaggaatccgatggctttttgaccgaagctcataatgtccaaaccgggatgttaactgaagaagctaagggaaaccatgctaaagtttcactgctaacgattcattcacaagaccacatcatgaatgccattacttttagagatctagctggagaaatcgttgatttatataaaaaataatatagtattttttatatattattgtttttaaaataaaagtaccgcagaaaaatttaaattttctacggtacttttttatttgaggattttaggcacgatatattgttgataatagttttggtaagttttagcggtaatctccgacgccgtcccactagtaccaaattctttaattttcttagcactgaaattagcttttttgatggcgctgactgagaagatttgtgcatcatcgcccactaaaaacttaacatttttagcagaggtcggtaacttggtatttttgacactttttagaactgctaacgtattggggacgtaatttctggtaaagctaaagatatcgattttaggtactttaataataatgttattgtccgtaaaattgatctgaaaaggaattctcgaattaatattattggcaatttgattttcaattaccgttgcactatcagacgtatcatctgtggtataatcactggaatctgatttagccatttggttgttggttaagttaggataagtctgaattccaagggccgctaaaattacaattacgatgtttgacttagaaaaaattctaaggggtttaaattttttagattttggcatcttcctgttccgtttcattttctatataataaagcattaataatagacaatatattacttatacaattatattaaacaatgtattaatacacaaacatttgtttgctatttggggcttaaatcgtattttagaatggagtaaatgatgattaaatatgcaatttttgatttggacgacactttgctggattttaagcggggagaacgagaaggtttaaccaaaataatgactaaatatggggtttctgacttgaagcaggggtttgatacatacaccaaaattaaccatcaagtttgggaagcaattgaacaaggtcaggctagagatgctctattgaatacgcgcttttccaaagcttttaatttattaggaattaaagttgacggagcaacggtggaggcagaatatcgtagtagcttagacactaatttttacaaactacaaggcgtagatgagcttctaagcgatctaaaagcggcgggggtccatttactagtaggaactaatggcgtcaaagaaacgcagcttcgtcgcttaaaaggttcaggactagagcattattttgaagactatttcatctcagaagacattgggtttgctaagccggataaacgtttctttgaaccgatgtttaaaaaatatgggaatttaacgacgaacgccgtgatggtgggcgatcggcttcaagccgacattttgggtgccaaacgcgcacaattaaacagtatttggtataaccctcaagcgttaccggtagttcaagcctaccaacctacttatgtggccaattcgtttaaacaaataaaaaaaattatcttaagcgcgtagtttaaaatgcatggataaactaatttttggtgcattttttagcgccgtgaaggtcaactagctaaaatgtttttcaagatttttaaatctttgaagaacatttttttagatttcatgtcactcttttttgattaattttaagaaaaatagggtatccagcaaaacgcgcagacaaggcgttttaatggataccctatactatatattgtattatacatatggataagcacatagatgttgtgttttcaagaattgaatttaaaaaatttcggagtaatctttagatatggttatttgaattatcgacagaaagaaggaccgataatgaatgcgcagagttagaacattcgacatcaatcatatcttaaatcgaggttatcaatcaacctcatatttcaaagtgaaacatttttttaatgtttggggtcccggcttaattgtgatgttagctgataccgatgcagggtgtttgatcactgcagctcagtcgggagctcaatggggatatacaatgattcttccccaaatcttattgattccagtcttatattttgcgcaagagatgacggtccgcctcggaattgtgactaaaaagggacatggtgagttaatccgagagtattttggtaagaagtgggcttggatttcggctggaaccctagctatttcagctattggcgcattattgacggaatttgtagggattgccggagtgggcgaaatgtttggtatttccaaatggattacaattcccattgcgaccgttttactgattgccgttgcgtttagcggcagctatcgacgggttgaaaaagtaggtgtcatgattggtttagcagagttggcttttttagtcgtggtagtaatggttaaaccgcaactgggcgatatggtgcgtggtattggtaccattccatggcataattcatcctatatttatttagtggctgctaatgttggagcagtaattatgccgtggatgattttttatcaacaaggagccgtagtcgacaaaaatttgggcgtggaaagtattaacaaagaaaaacatgatacttttgtgggaaccttggtaacgcaaggaattatggtaacgtttgtgattgcttttgcggcgacgatgggacttcagcaccagcaagtggccttagaaacggtcagtgacttagccagtggtttaagtgcatttatcggaagttatccggctaaattatttacgggaatgagtttattaggtggatcattagtggctgcgttagtcgtagctctagccggtacttggggcgttactgaggttttaaattggaaacatagtttaaacgaaccgcttcaaaagggaagtttagggttttacataatatactgcttggcacatattattggggccattttggtcttagctaacatcaatttagttaatttagcagtttcagtggaagtaatgaacgctttacttttaccaattgttttaggttttttgttaattctggaagcgaaagttttaccagaaaaatatcgcatgcacggagtttatcgttggttagtgacggttttgtgcatggtagtgatggggttcggtttatacatggttggacctattatggggatttggtagaaaggggattgaattttagatggatagtattaaaacagtactaagtgacaaaattgaaaatttgaaaaaaatgaaggtgacaaaagttgatggggaagtcgttaacttttacccttataaaattgctttagtagtagaaacattaacctctgatgcggcgctccagaccagcttaaaagaacaaatttttaatcgtattgctgatgattggaacaataacatcagcacagccgatattagacaagtttttcaagaaattttgcgtttaaacaatcaagctgagctattagaacggtacgaagcttatcgggaaaaagatattaaaaaatggaagaccgccattgacccacaatacaaacttaatcagctttttaatggaaatgacatggtggttcatgaaaacgccaacaaagacagcaatgtttttagtactagaagagatttaactgccggaatggtgggtaaatcagtgggattaaccatgatgcctgaaattgtagctaaggctcatttaagaggagatatccatttccatgatttagattattctccactaacttcgatgaccaactgttgtctaattgattttaaggggatgctggaaaagggctttaagattggaaatgcagatgtggaacctcctaagtcaatccaaacggcgactgctcaaatgtcacagattattgctaatgtggcttctagtcaatatggtggttgttcggccgatcgagcagatgaattgcttgctccatacgctaaattaaactatgaaaaacatttaaaagaagctgaagaatgggttgaagaaggtcgccgggacgaatttgctaaaacaaaaacggctaaggatatttatgatgcaatgcaagctctagaatacgaggttaatactttgttttcatctaatgggcaaactccttttaccacggtcggattcggattaggaacttcctggtttgaacgagaaatccaaaaagcaatcctcaaggttcggattaaaggtttgggcaagcagcatcgtaccgcgatttttcctaaattagtcttttcaatcaaacgcggtttaaatctcaatgttggtgatcctaactatgacattaagcaacttgcggttgaatgtgccactaagagaatgtaccccgatgtcttgatgtacgacaagattgtcgaattgacggggaactttaaagctccaatgggctgccgtagtttcttacaagcatggaaagatgcaaacggaaatgaagttaataatggtcggatgaatttaggcgtagtaaccattaatttaccgcgcattgcgctggaagctaaaggcgatcgtcaggtattttgggaaatcatggaagaccgcgttgaaaccgctcggcgcgcgctattattccgaattaaacgttgtcgtcaggcacagcctcagaatgcacccattctttataaaagtggtgcatttggcaaacgtctccaagatgaagacgaggtcgatgaattatttaacaagaatcgagcaacgatatcgttaggatacattgggttatacgaagtcggcacggctttctttggcgccgattgggaacaaaatccggaagctcatgattttaccgtaaaaattgttaagtacttgcatgattactgcctccgatgggaaaaagaatatggctatcattttagcgtttattccacaccagctgaatcactaacggatcgtttttgtgaagacaatattgaaaagtttggtaaggtaaaagacattactgacaaagaatattacaccaacagtttccactatgatgtgcgtaaaaatcctacaccatttgaaaaattaagttttgaggaagcctatcctaagtacgcttcgggtggatttattcattactgtgagtatcccaatttaaaacaaaatccggctgcgctagaagcggtctggacttgggcttatgaccatgtcggttatttagggaccaatgcttcaatcgatcattgctacaaatgtggttatgatggcgattttaaacccactgcccggggcttcgaatgtgcacagtgtggtaatcgcgatcctaagacttgtgatgtagtcaaaagaacctgtggatatttgggtaatccaatgattcgtccgatggtccatggtcgtcatcaagaaattgcatcacgggttaaacatatgggtcaaggtgaagccaatgaataaatcacgaccagtacgtttacctaaaaatccggaaccacaagcctggttggcagttgatcgtagtctccaatacattgccgactacaaaccttttaacatggtggatggtgaagggattcggtgtagcttgtatgtttccggatgcttatttaattgcccaggttgttataacaaagctgcgcaaaattttcattatgggacgccctattcagatgaattagaagatcaaattatgaaggacctcgctaatagttacgtacaaggtttaacgttgttagggggagaaccgtttttgaacacgcaagtttgtttgcgattggtgcgtcgaatccgagctgaatttggtaacgaaaaagatatttggtcgtggactggctatacttgggatgaactgatgcaagaatcatatgataaattacaactattaagttatttagatattttggtggacggacgctttttagaagctgaaaaggatttgagcttacagtttcggggaagtgccaaccaaagaatcattgacgtccctaaatcgttaaaagaaaatcgggtaattatttgggataagctaattcgataaatggggatgatataggatgagtacgctattaattaaagatttaaaggtggctgccggagaggaacctattcttaacggagtaaatttagaaattaaagctggcgaagtacatgcattgatgggaccaaatgggacagggaaatcaaccctatcggaaaccatcatgggcaacccgctctatcagattgtggaaggacaaatctttttagatggtcaagatattacaactatgagtgtggatgaacgtgctcgagcaggaatgtttttagcaatgcaatatccgacggaagttgccggaatttcgaacgccgattttattcacgcggccttaaatgcgcggaatggaaatcaaccggtggccattttaccgtttttaaatgaactaaaacaacaaatggattttttagaaattgatgaagactatgctgaccggggcttaaatgctgatttttctggtggtgaaaagaaacgcaatgaaattttacaaatgatgatgctgaaaccgagctttgccattttagatgaaattgattctggtttggacattgacgctttgcaaattgtggctaagggaattaatgcaatgcgaagtgatcaatttagttgcttgatggtgacccactatcagcgtttattaaattatgtggttcctgatgtggtccacattatgatgggcggtaaaattgtgaaaacaggtggcccagaactcgcccaagagctagaaaaaacgggttatgccgatttaagtggtgccgtggaggggagcgataacgattgaaacaaaattagaatcgccaactaaatatccgaaaattatggggattaaatatgatcctcaaaattttagctatgcatcgatgacaacgacgaagtggtcgtggaaagctaatccattagccttacaagagctacaggccgcaggtggcaggattcaagttttcggccccacgcagcagcttagtgtcgccggaaaacgattgttagaaagtgaattgcaagctaatgtggataatcaatttatggtggaacatgcccagcaatcttggcaaggacttgagctgattctaccagcacgggtgaccttaaaaaataagttgcacctcgaaattaccttcgaagcagcacaaccttccgcttttaccatgctattgaacgttggtgcgggaagtcagatacaattagaacgcgaaatccattatccaccagccagcacccggcttaacttattaacatgtggaaaagtggaagccgatagtcgattaaatttagttgatcggttgcagggcggacagtcgccacagcaaagtttatggatggcaaacttgcattgtcaaaaagacgctcagttagattggtcattttaccctgaggtgaagggtaaagtacttggaaaatgtatcacggtgcttgaagaacagggaagctctgctgtattcaaagtgggccaatttggtcgtcaggatgattggattggaattcaaggattaatcgaccatcgtgctcccaagacatttagccgaattaaaatgcgaggggttctttatgaaaaggcccaggtgtattttactagtatcggtaagattaataagggagcccatggagctaatgcagcccaagaaagccggttaatgaccattgaaccgcatgctaagggaagtgttaatcccctgttaattattgacgaaaatgatgtgcaagctggtcatgctgctagtgtaggacagtatgatgaagaagcgttgtactatcttttaagtcggggattaacggaggtggatgctaaacaaattttaatcaataatttcatggaacctgttttaccaaaagaaactgtggaaaagtaatggtggtaaataatgatagatgatcaaaaaatagcctatttagataatgcagcgaccatgccgatgccagacgaagtattggaagtaattgatacgtactaccatgcccataaagttaatgtgcatcggggaatgtatcggttagctcaccaagttacggagcaatatgaagcagttcgccaagctacggctaattttatcaatgctcaggactcgtcggagattatttttaccagtggcacgaccgatgccctaaatttagttgcttttggttatgcggaaaaacaacttcaaccagacgatgaaattattatcagtgttttagaacaccattcgaacttcattccgtggcaacgcgtggctcgtaaaactggcgcaaaattgaaaattgtcggtttagacgaccaacaaaatttagatatgcagcaattttccgaattgcttacggagaaaaccaagctagtcgccattacgttagtttccaatgtgctaggaagcattgtggatgctaagcaaattattgaacaaacgcatcatatggggggagtggttgtattagatgctgctcaagcagttggtcatttacccttagatgttcaaaaattggatgcggattttttagccttttctggacataaaatgtatggtcctaccggagtcggagttttatatggaaaacggaacttgttagaacaggttgagcctttgcgctttggcggggaaatggctgatgaagttgatgctcaaacggcgacgtttcaaccgctccccctacggctagaagccggtacgcctaacattgccggagttttagggctggggactgctattcaatatctacaaaagattggttttgcaactattaaacaacatgaacagcaattattgaatcagttataccaaggattacagcagataccagcaattaaaatttatggtccaaggtccgtagccgagcgccaaggggtgcttagttttaactatggaactattcatgcccatgatgtagcgaccattatcgataccgaaaatgtagcggttagagccggacatatgtgtgcagaacctttaatgcaagctctaggagtaagtagcgtcgtccgggccagtgtttcgtatatgaacacgacggaggatgtcgaacaacttttagcagcaatgaatcaggtgggccaaattttattatgagtaatattcaagaactttatcaaaaaataattgtaaatcatgctaagtatccgatcggacaaggagttttaccgcaatataattaccacgctaaattgaaaaatcctgattgtggggatgatattgaggtttatctcaaggtggtggatcagcatttggaacagattagttttacgggacaagggtgtatcatcagtcaagcttccgccagcatgatggtagatgctttgtcaggcaagcgcattttagaagcgcaacaattgatgcaaaattttcagaacttgattctgggaaaagattatgatgaaagccaattaggtgatttaatcgcgtttgcgaccctcaaccaatttccaacgcgtgttcgttgtggaatgctagcatggcatgcaatggcagatggattgaatcaaggaggaatcagctttggaaagtgaaaatccacagtttgaaaaagaccaattaagggatgaacgtggagcgatggatccagtcgcccccgttttttcaacaggagtggggattgatgctgaaacaatcaagcagatttctcaggctaaaaatgaaccggcgtggatgcttgaaattaggttggtagcttatcaaacctatttagacttaccgatgcccaaatttggtcccgatttgaatggaattgatttggatcaaattaagtatttccaacgtgctacggatcacatcgctcgggactgggaagacgttcccaatgatattaaggctacttttgaacggattggtgtgccagaagccgagcgtaaatatttggcgggctccgctgcgcaatatgaatcagaagccatttatagtaatctcaaaaaagatttggaaagccaagggattatttttatggataccgattcggcgcttcagaaacatccagatttagttcgccaatattttggaacactggttcctgctgatgataataagtttgcagcacttaacacggcggtttggtcgggtggtacctttttgtatgtaccaaagaatgtccatgctgatattccaattcaaagttattttcggattaatgctggaagaactggtcaatttgaacgaacgctcatcattgttgaagaaggtggaagtgttaattatgttgaaggttgcacggcgcccaactattccgaagatagtttgcatgcggcggtcgtagaagtttttgttaaaaaagatggctattgtcgttatacaaccatccaaaactggtcgaccaatgtctatagcttagaaactaagcgtgctcaagctgagacgaacgctaccatggaatggatcgacggtaacctaggttctaaagtgacgatgaaatatcccagcatttacttagttggccaaggagctacgggttccatgctttcaattgcggctgccggagccaatatgcatcaagatactggcgccaaaatgattcatatggccccgcatacgcacagtaccattgtttctaaagcaatttgccacaatggtggtcgagcagattatcgaggattgattaagtatactaaagccgcaaccaaggctaaatcgcacgtggaatgtgacacgattttaatggaccctgatagtgctagcgatactttcccagtcaatgatattgaaactagtgatggaacgattgaacacgaagcccatgtctctaaaatcgcagaagatcaattgtattacatgcaaagtcgcggtttggatgaagcaacggcgtcccagttaattgtgatgggctttctggagccctttaccaagcaattaccgatggaatatgcggtggaattagatcggctaattaagtttcaaatggaagatagtattggataaattgaaaagagtaatacgtaaaaatccctataatggcggcttttagacgtattactctttttttataaacaaaattgttgactttatgtcgttatcgtcatatagttatttatgttgataacaacataaatgtaaaaacaaaggggtaaaaaatcatggaaaaaacttttaaaactttagatgactttttaggaacacattttatttacacatacgataatagttgggaatacgaatggtatgctaaaaatgatcatactgttgattatcgaattcatggtggaatggttgctggtcgttgggtaaaagaccaagaagctcatatcgctatgttaacggaaggtatttacaaagtagcttggactgaaccaactggtactgatgtagccttggactttgttcctaatgaaaagaaattaaatggaacaattttcttccctaagtgggttgaagaacatccagaaatcacggttactttccaaaatgaacacatcgatttgatggaagaatctcgtgaaaagtatgaaacttaccctaagctagttgtcccagaatttgctacaattacttatatgggtgatgcaggccaagacaacgatgaagttattgccgaagctccatacgaaggtatgactgacgacatccgcgctggtaagtactttgatgaaaactacaaacgcattaacaaataaagtttagatttggagagaaaccaataatgccaagaccaagagttttaccgtacattattttaggattattaaataaaaatggaatgatgtctggtaaagatatgattagtgagtttaaaactgatataagtgagttttggacggtatcacatagtcagctctatcccgaattacaacggatggtggatgaaaagcagattaaggtggctgaagatgtggaagttaaggatcggaaagtcatcaattacgtgattgaagctaaagggcaagagacgctaaaaagatggcttgccgaaccgattactttaaagaatgatgaattaacatcattgaaactttattgtatttcagaccaacgagccccaatcttgcaacaaattttaagacagtgtttggcattgcatcaacaaaaggtagttcatttaaaaactcgaaaagaattattatttggagatgaaccagcgattaaagctaattacggacactatttgattttatccagagccatcgaacgtgaatcggactatgtcaattggctccaatctaaaataaactaataaaaagcgttgaatctaagccgagttaggctgataattcaacgctttttttgatggtttgttgttgtgaaatagcccaaagaattagtaacaaaatagtgagataattgataggtcctaaaaaatatttaccaatatgataaccaattaaatttcagattagacctatgctattcttaaagtggataaatgtttaattaaattgaggaatgaaggggttttggaggatgaagaaacaagtatatattattatcagcattgtgttagttattttaattgcgttattggcattagctaatacggcagcgacagacatcaactttttatttacgacgattaagataccactaattttattgattttggtttgtttattaattggtgcctttttcatgtttgtattgtcgatgagttctgctatgaagaaaaatggcgaaattaaaaatttgaaaaatgaagttgaacaaactaagcgcgaattaggacaaaagacggaagaattagaacgtcgtaagaaaaatgcagatacgcaactagggcgttaaatataaatagggttaatcggtaccagttcgtcgaacgcctcgattgtgggttatgatactttgaaaaataaccctaaatcatatatcttcaccaagaaatataatcagacgattaatcttaaggttaaaccacacactaaatatgtaacattgtatttcaatcaggttgattacgatggtaagcataaaaaattaaccttgtatgcgacaatgtatttcctagctatgactggacagactgctacaattcaaacgccagctgggtttacctttaaagatggtagtacagttcgaaagctagatattaaagaaaatacaggagaagttttgtatgaggttaagaaggcgccgtttaaacagcaaattaaaatttatcgcgggtattatttgttggggattacgatggtagtattcgttgtattggatgtgttgttggcttggattggtagtttttttgaaaaacgtaaacaggaagaatagttaaaaaagcatgaaaatcgatgagattttcatgcttttttatttggaaagtagatatatctcttagggataatacttgtactcaatatagaatatttaaaagtgatttttaatggtaaaattatttagtaagtaaatttttcgaattgtaggttgtaattttatgagtaaaagagaaaaatcaatttctactccaataattggaaatgttccctttagtgaagatgggctaaaacagttagagaaaatcgataataaaaaattactattagaataccccactgtttacattatttattctgaaagaaatggaatgtatcaagtgtatgtcggggaaactaataatatcaaacaacgaacaaaggaacattttagagagggaaatcgttatgcgaagggttctaatatgtttgtgattggtcatgaacatttctcgcattattaaatccttctttttaaacttaaataatctttttaggtaattcaaaaataatatttaattctagcacacttttaaaaagttagtttaagctcatttgagttaacttttagaatactaccccacaagcgtttgatccattacgtctaaactctattgcactacctttttatttttgatagaattatagtgttatggagagttggcagagtggtaatgcatcggactcgaaatccgacgacccggctaataccggcgcgcaggttcaaatcctgtactctccttattagtatctattagaccctaacgagaattaccgcttgttagaaataaaatagcttaaagcctttcatatcaaggtattaagctatttttttgttttttgtagttccgattagaaaaccactagaaattaagaagttggttcccattttaagagcatttttcgaaaaatttcattttatctaattcaccaaaaaacattccaatcataaagaattagtagattaataaatttaatgagtatagaatttttatatcctgatctaactgttatcaagacccagagttgtttattctaaatttacattagtcgattttgtcactttataatgtctaactacaataagcacattgatgaataaacgcttaaattatcaagaaaaagacttgtacgactttgtaccattttaaataaaaaagctccctagtcattggactagcaagctaaaataagtagatatttgagaatataattaatattccatcaaacttaatgtatcatagtctttaattttttcacggccattgaggtcttttaattcgataaagaaggcagttcccacaactataccacctaatttttcaactaattcaatcgtagcagcgattgttccacccgttgctagtaaatcatcagtaattaaaaccttttgtccgggtttgattgcatccttttgaagatacaattctgattttccatattctagaccgtaagtagctttaacggtttctcgggggagttttccctttttacgtgctggtgcaaaaccaattcccatttcataggcaactgggcatcctacgataaatcctcgtgcttcaggtcccacaatcatttcaacgcctttatctctagcgaatttaatgattgcatttgttgcttgacgatacgcctcaccattttccattaaaggagaaatatcacggaatgttacacctttttctgggaaatcttgaatacttgcaacgtagtcatgtaagtctaatgtcattttacgacactcctttgttatcaacattcatcagtctttcaactatagctgatagttcatcaccactactatagagtaatttttcctgagtttgaattaattcttcacgcttcttatacgccggtgcctcagtaagctggtgctgttctgcttcagcatcgatgaaaagaagtccgttttctattttaacaaaattcaactcaaaaaacacttttatcatgaagttgatcttctcttgatctatttttaattttggtccaagttgcatgatatctgttttagttaatttttgagttttaacaataccaaacatctgcttaaattcaatccgactgggcatgccactagcgtagaaatcgacgttatgaaagaaataagtaatgattctttgcggctgcgtagccttgataagttcggccatttcggctagattatcaggacaatctactaatacaatcgtgtcatttttctcaattgctgacgaactgtaataatagaatttacgattaagattttgactttgaatcaaatccatcaacttttggttaaaaaagacatattgcatgtcactcttaaataagtttttattcaaatttgaggttcgttgatcaataacttgcaaaccatcgatcttgatatcatccgtcataaattgaaccgaaacattaccacgccactcgttagtattgatggttcccaccaaactaatgggattggcaacattatttaagacatcagctaactcactccgtttaaacgcaatggcattgatattttgattaccatcatcaagcgtgaactttaaatgtgccccatctttaccaattgcctttgcttctttaacacgaacgtcttcaagttcaaacttcggtactgggttattcatcccaaacggtcctaaaattttcatttctgaaactaacttttcagttaattcttcaatatttacttttaaatcaatttgtaattgcggctgttgcttaaaatctaaattagctaattgacccgccttttctaactggtcagttagagttgcaagctggtcagcccctacggtaaccccaatagccatatgatgtccaccgaacccaatacactgttctcggatagggttaatagcttcaaacaaatttagagctgcaacactacgtccagaccccttataaattccattaccaccttgatcactaagaacaatcgtcggtttattagtttgttcgacaattcgactagcaataatccccaagactccttgatgccagtcgtgtccagcaataactaacgtttggcggctagcatgctcatcatcaagggcaatttcttcagcttcagtgtaaatatcactaactaatccctgacgcttcgaattaatcttattaatctcttgtgcaattgttgtggcttcttcttcatcaaaagttgttaataattctactgctcggctggcattttctaatctaccaacagcattaattctcggagccacagtaaaaccaatgtcttgctcgtcgaaatgacttacatcaacacctgatatttcgattaacttctgtaagccaattctctgggtgtttggtatcatttctaatcccatctttaccaaaaaacgattttcatcggtcattgaaaccaaatcagcggtcgttccaattgcatacaagtcaaggaattcttcgggaatttcttcaagtaaagctgttgccaccttaaaagctaccccgactccagacaaatcaccaaatggataggctccctctgggtgacgtggatggataattgcatatgcctccggtaatacttctggtatttcatgatgatccgtgacaataacattcgtaccctgatcttcagcaaatttgattgcttcatttccggcaactccattatccacggtaatgattaactgaaccccttcatcattaatgaagtgttggtactctttcaaattaggaccataaccatccttaaaacggtctggaacaaagtattgcacgttagcccctaactgatctaacgtttcatacataatggtcgtacttgtaaccccatctgcatcataatcaccgtatacaagaattttttcgttgctttcaatcgccacaaaaattcggtcaagggctttttgcatatcgtgcagtagcatcggatcatgtacaatcgacatatcctcatcaataaaactgagaatgtcctcgcctgttttaaaacctctagcgaccatgattttaaccatcgtctggctaagtttggtttccgatgccagttgatcgatatcaacatcatctaacttgctaacttgccaattaaatctgttatctttcattaattaactccaactactttcgattaatcaagggactattaacgattaaatcacccattttaggaaataaggtgtacataatcgctcccactcccattattttaggtacattaacttccctaagattttcaataatggccttattcaccaattcagccacttgattcgcgttaatcacgaattgttgaacaccttttaaatatttaccactaggatcagcaatactaaagaaattagtatccattggtcctgggttaattgtgtggacacggatgttgcggtcatacatttctagacgaagggcgttagaaaagccgatcacgccgaatttagcactagcgtacgtagttgttttagccgtcgcaattttaccagcaatagaagcaatattaacaatatctgcagcttctccaacgtgatccaccattaatggcaacattaagcgtgtgaacttaatcatccccgtcaagtctgttgcaaacgttcgttcaatttgttcaaagctttgatttaataagttttcaaaatatcctagcccagcgttattaactaataaatcgactgttccaaggtgtgaatcaatccatgctcccgtttgacggatctggtcctcattcgttaaatcacatgccaaacagaatattctattttcacctttaacaatacatttttcagccgttgcatttaacttttctgaatttcttccaattaaaactaaattatcatagtgagtgctattcaaaatcgcaatcttttgccctaaaccgctgcctgctccagtaattactgccgttgtcattaaaatcactcctacttttaaggtaatggaatatcaattatgtcaaaatcacgaacaactttactattactaaaaatttcctttgcatcactttcaagttgcttactgagctttcccgtataacgagctgaaatatgggttagcaataattgccgagcattagcttgcttagcaattttcgcagcttgaatattagttgaatgataataattacgtgccaagcttccctcttgttttccaaaagtactttcgtggaccaaggcatccgcatctttagctaaaagttcgatattaggcgtttgtcgtgtgtcgcccaaaactgtgactactcgacctggttgaggttttccaatgaaatcttgcccgttaataactctaccgtcatctaaagtaacttctttaccttgcttaatctgaccataaataggtcctgaaggtatcgctaattcttttagcttatcgactaaaagttcacctggatggtctttttcctttacccgaaaaccgtaacttttaattcgatgatctaactcagcaacgttaacaatataattttgatcttcaaataaaacgccctcttgagctatttcaacaaattttattcgatatgaaagttttgactctgaaatacgcaatgaggtcatcacaaagtctttaatgccagttggcccgaagatggtaagttcttcgctaccaccctgattagaacgactacttaagaaacctggcaaaccaaaaatatgatcaccatgaagatgggtaataaatattttatcaattttacggggttttatattagtttttaagatttgatgctgggttgcttcaccacagtcaaaaagccaaacttcattactttcatctaataattttaatgctacactagtaacattacggaatttaccggggcttccggctccagttcctaaaaattcaagttgcatattttcacctatatctattgacttaacaatccattttacaatacttttaattgtatcactagcatcgactataattctaagatatccttgctatataagtattattaaataaggaggtttctttttgaatttaaataatttcataaaatcaacggccgaattacgttcccacttaattcttaaaggggatcgagaacaattattttttgtttcagggatcatcgttaatacccttcaaaaagaaatattacttacattaactttaaatcctcatcagcttccccttagtcaatttcgaaccaaaactattgaagcaccaagagaagctaaaatattattgttcaaccccgaaactaaactaaaaactcatacatttggatattatctacatgatcaatatctagtaatcaagtaaaaagtcagtgatgagaacagaattgtttaagattaaacattcctttctgtacttaccactgactttaataatttttattctacaaattcaaatacaaagtccaaaatttgaacactatctccattacgtgcacctaagcgacgtaattcatcatcaattcccatgccacgcatttgacgagcaaagcgtaaaagactttcatcatgcgttgtatcagtcatcttaaagagtttttcaatcttttcaccctcaataacccaaacgtcatcaacattttcaatggtaaagtctttttctgaactaaattcatatgtcttttcagtttcttcgtcagaagtagcaattaatgaatgctgtggaatttcttccaatgcatctgcagttcgagcaactagtttttcaagtccattatgggtgatagaagaaattgggaaaatttcaaaatcagcataacgttcatcagctcgaacttgtttttcaaatttcttaagctcttcatcggatccaggtaaatccattttagtcggaacaataatttgccgacgttccaacaattcaggattatatttttttagctcttcattgatttgacggaaattagtgaatggatcttcttccgtcattccactcatgtctactaaatgaagtaagacccgtgttcgttcaacgtgacgtaggaattcaaaacctaatcccacaccttgagaagctccttcaatcaaaccaggaatgtcagcaataacaaaatcacgaccatcatccaattggaccatccctaagttaggtactaaggtcgtaaaatgatattccgcaattttaggcttcgcactcgttactactgaaagtagtgttgatttaccgacagatggaaatcctaataatccaacatccgctaaaaccttaagttctaattgtaattcaatttcttctccaggttccccattttcagaaatttcgggagcaggatttcgagggctagcaaaacgcatatttccacggcctccacgaccacctttagccaccactaattcttgtccgttatcggttaaatcaccaattacacgtcccgtggttaaatcgcggacaattgttccacctggtacggaaatcacgagatcttgagaactacgtcccgtcatttgtttattcatcccatttttcccagaatccgccttgaacttatggcgatacctgaaatccatcaaagttctaagacctgggtcaacttttaagacaacgttaccaccacggcctccatcgccaccagctggtccaccgttgggaacatatttttcacgacggaaagctacaatcccatttccaccgttaccagctttaacattaattttaacttgatctacaaacattattttctcctaaatattttatttcaccgagaaattcctatccatttgttagtgtaccctattttccgtgcactgataaggacactttgatagttttagctactttttctggaattccgagttcttcaatttctttcaaattagcatccctaattttattcaatgaaccaaacgacttcaacagcttgttccgcgttttaggtccaacaccttgaattaaatccaattgggaagccaacgaatttttggcatgcaactgacgatggaaagtaatcgcaaaacgatgcacttcatcttggattctttgaaccaaataaaagccctgacttttaggatccaactgtactcgttggtcttgactaccaaaaatcaaatccgaagttttgtgctcatcatttttaaccatcccagcaactggaatatgcaaacttaattcattcaccaaaacatcctttgctgcattaagctgaatatcgccaccgtccattaaaatcaaatcaggcaaagattgtttctcttttaatagtctaacatatcggcgacgaattacctctctcgtactggcagcttcatcagcatgatcgaccgtatttagcttaaatttgcgatacatctttttatctggttttccatccgtaaaaacaaccattgctgaaactaattcagagccttgaatatgagaatggtcaaatgcttcaattcgatgaccttcagggattccaagcgcatcagtaatttccttcattgcgcctgttgttttactttcatctaactccattaatcggaacttttcctcaagggtaatttgtgcattttctttagctaactctaacaagtttttcttttccccacgctgtggagtgcgaactgggatacctaaaatttcggccataattttattatctaagccactcggtactaaaatttcatttggcaaaaccttatttttattattataaaattgaagaataaaagaagaaagctcatcacttacatctgttgcgattggaaataatctcttctctcgtttaatcaagcgtgattgccggataaagaagatttgaatagaaagccaccccttatcaaggtagaaattaaacaaatcacgtggcgtgctatcatttgaaataatcttctgcttctcaaccgttacttcaatataatgaatttgatctcgtatgtcggctgcccgttcaaattccattgcttcagaagctttttgcatttttgtttgaagggactgcttaatctttgcgacatttcctcgtaaaaatgatttaattttagcgatttgttggtcgtattcttctttaggtacctcttggaaacaggctcccaagcattgccccatatgatagtacaagcaaggacgaccttgaaatccattgcatcggcgtagtggataaaccttttccaaaaaatggagtgtttcttcagcagcatacacgtttggataaggtccaaagtaaaagcccccatctcgacgaacacttgaaacaatttccattcgtggatctttttcattcgtaattttaatataaggatagccagtcccttttttcaattttatattgtaataaggttggaacttttgaattaaagtaatttctagtaaaaaagcttctttatcgctagaggtaacaatatagtcaaaatcggctatttcactcactagtttcgccgtttttccctcatggctacttttaaagtaagagcgaacacggtttttcaagtttttggcttttccaacgtaaatgatttggctattaagatttttcatctggtaacagcctggtttatctggtaacaatgccaacttatgttcaatgtgttctgatgccaatttgacccctcctagtttacataataactcataacattatactctgtttttaccatattcagcaactaaaacgaaaaaacaggtagtagtattacactctacctgcttttcctatttgactaaaattttagataagaattccttggcccgatctgtcttaggattgctaaaaaattcttctggagttgatttttcttgaatacccgcattttccataaaccaaatttgattggaaactgactgggcaaatcccatttcatgagttaccacaaccattgtcatccctgatttagctaattgacgcataacattcagtacctctccaaccatttcaggatctaacgcagaagtcggttcatcaaaaagcataacatctggtttcattgctaatgccctagcaatcgccacccgctgtctttgtcccccggatagattatctggataggcctccgccttatctgataatccgacttgatccaacagactaagggcttgttgattggcttttgcttcacttaatcccttaactcggatgggagctaaggtaatatttttaagaacagtcatattcggaaataaattaaaattctgaaagaccatgcctactttttcacgaacatgttcaatttccttttgagtttttttagttaaatcttcaccttctaacgaaaccacccctgccgtaggtttttctagaagtgttaagcatcgaagaaatgtacttttaccagctcctgaaggaccgatgacactaatgatgtctccatccttcacttctgctgaaatatcctttaatattgtattttttccatattttttggtcaaattttcaattttgatgatttctttagccattattaaacttcctttcatagaacttaagtaaacgtgatagtgagaaggtcattacaaagtataaaatcatcgcaacaacgattggagctacccctcgataagtatctgattgaacaatctttaattgataaattaagtcggttacaccaataattgaaacaattgaactttccttaattagagaaataaattcattccccaaagctggccaaatattctttaaagcttgaggcataattacaaaacgcatccgatctcgcttattcaaacctagactttcagctgcttcacgttgtccatcatcaacggaattaatgcccccacggattacttcggcaacataagctccactatttaaagatacagcgataattcctgcggtaagggctggtaaattaacaaataatccaagtccgaagtaaacgaacattaattgaaccatcaacggcgttccacgtacaaattcaacatacgctgctgataaaccacgtaaaactttattgtcactcaggcgtagtaatgctagtaatgtcccggtgataaaaccaaaaataacccccaaaattgaaataaggattgtataacccactcccatggcaaagtacttccaataatgaatcatagaggtattaacggtgtttccttttaaatacgtccctgcttctttaagatattgtggtaataaatttttagcttttatcttactaattgtagtatttattttctttctcaggactggcgaatttttaggcattgcaaccgctgtgctagtttcatcatcatttaacgtgaatccgccttggataactttaataccactattattagcagcatatgcttcagcagtaggtttttccatgacaaccccttcaactttattagtttgaagagctagaattaaatctgcccctttttgaataccactcactttggctccatcaatttgttttttggctaaattgtactgaattgagccagtttgagctgcaatctttttatgtttaaaagaatctttatttttataaatacctgcatcctttttattaattagaatgctttgtccacctttatagtaaacatctgaaaaatcaactgatttacgccgagcagcactaggattcatcccggaaagaaccatgtcaaccttaccggtttgtagtgcaactaataaagaatcaaaatccatatttttgatcttcaattttacacccaaatcatcagcaatgtccttagctacgctaacatccattcccacatctttactcttattattagatgttgtttgaaattcgtacggggcataatctggactggtaccaagtacaatataaccgcgcttcataatccgatcataagtaacatccttttgatctgccttaatgctagttgtaaaacccgaagttgcaaaaactgttatagctaataacgctaacatgataaatttatatatttttttcatcgccatcatcctttattcaatataatgttactaatatacatctacaccctttgatataaaagaattttatttaatatatgaatttttatacattaaaatatataatattcactataaatgtgaataatttttattttctgacaaatgaaattttttttggtattatggtcggaaagaggtgattagaaatgggactcactgttaaaagaaatgataatctcgaaaaaatgttcgatcaattaacaactcaaactaaaacttccgtagaggaaaaagaaaagaaaaataaatttcttgctaaaggtactaataaaaaagattcaaaaaaataaaccacaatcatcagcattaatgctgttaattgtggttttttatttacttaaagttgccgggataacgcttttcaagtgtggcaatattttgtttggccacctcatcgaaaggaatatcagcccattcagcaacttgagaaagataccatagaacatcgcccatttctttggtaagttgttctttatcaagatcagctccacggaacgtatagtttttaactaaattcacaacctgtccgctttctccggctagtcctaaagcacaattcgttaaaacttgttcattgccaaatagggttttatttgcagtacgttggtattcattaaattccatgctattctcccatcctatcttcaatccatttccagacttcttcttttcccattttagtttgagcagagaacatttggaaagcactacttccatcaaaatctagtgcctttttaattttactttcgtgttgattccattttcctcgagcaatcttatcactcttagtagcaacgactagaacgggaatatcataataacgtagatattgatacatggtgatatcatcgtcagttggttcatggcgtgcatcaaccagtgaaattacgcctttaagctctttacgggaggtgatatacttttcaatcatcttcccccatttttcacgttctttctgagaaacttttgcataaccatagcctgggacatcaacaaagaataattgatcttcaacccggtaaaaatttaaagtttgtgttttacctggttgagatgatgtccttgcatatgatttacggttaattaacgtattagttagagacgatttcccgacgttagagcgtcctaccaaagcaatctcaggataaccttgttctggatattgatcgggtctcactgcactaatctgtaattctacattatggacttccattacttctccaccttccaatttctgcttttaatgataacatggatcaacaaaaaaagaacccgactaaaggaacttatagcctgattcttaaaacttagactacgatgcttgttcgtcgattaactcaacttcaggttccgcaccttcaataacagtctttttatttaccgtaacttttgcaacatcattgcgagaaggaatttcaaacatgatatctcgcatgacattttcaataattgatcttaacccacgagcaccagtattacgactaatagcttggttagcaatcgcatgcaaggcctgtggtgtaaatttaagttctacgccatctagacctaataacgtcttatattgcttaactaacgcattcttaggctctgttaaaatatgaacaagatcttcctcagttagtttttccaacgctgaaagaattggtaaacgtccaataaattctgggattaaaccaaagttaagcaaatcttctggaataacttgttgcatcaaactcttatcttcttcaacagtggtacttgcatttgtaccaaagccaatggtcttatcacctaaacgatttttaacaattgtctcgatgccatcgaaagcaccaccaacaatgaataagatgttcgtcgtattaatttggataaactcttgttgtggatgttttcttcctccttgaggtggaacattagcaatcgttccttctaggatttttaaaagggcttgttgcacaccttcaccggaaacatcacgagtaattgacacattttcgcttttcttagcgattttatcaatttcatcaatgtaaattattccacgttctgcagcttcaacattgtagtccgcattttgcaataacttaagtagaatattttcgacatcttcaccaacataccctgcttccgtcaatgtggttgcatcggcaatcgcaaaaggtacatttaaaattttagccaaactttgagccaagaaagtttttcctgaaccagtaggtccaattaaactaatattacttttctggagttctggttcatcttcgtcagctttagtttcagccatcttattgattcgtttgtaatgattatatacagcaaccgataatgtctttttagcttcttcttgtccaataacatattggttaagataatctacaatctctgcaggagttggaacatccgtgatttcagttggtgcgttttctgaagccaactcttcatcaatgatttccttgcaaagatcaacacattcgttacaaatataaacatctgggccagcaataattttctttacttgatcttgggtcttaccacaaaaagaacaagtaactggttcattcgtttgttgatcatcaaacaattctgtcacctctcaaatgatttttaccactatcatcatagcaaaataaacgactataagccaatttctataactttagtggttaataaacaaaaacgattttgagataaaacctcaaaatcgttaaaaatagttttaattattttttagcagcctttgattttggttcttcaattgctgagtctttgataagttcaacagctgatttaatagcaacatcatgcttgatcatatcttctgaaagagctgagcgaacagctttttcttccatgccgtattgttctgctaaatctttgatttcagcagcaacttcgtcatctgaaggatcaatcttttcagcttcaacgattgcttctaaaacaagagttgtcttaacacggttttcagcaccttcgcgtaattggtcacgtaattggtcttctgatgaaccagttaattggaagtacatttcagggctaattccttgttgttgcatgtttgcaagatattggttaacttgacgatcaacatcttcatttaacattgcttctggaatttctgcaatttcagcattgtcaacagcagcttgaacagcttctgtttctttagcatcactagcagcttggatcttacgtgatttaatttcttcttttgtcttaacttttaaatcttcaagagaatcaacatcttcgtcaacatccttagcgaattcatcatcaagttcaggtaattccttagtcttgatttcatgaatcttaaccttaaacaaggcatccttaccttgtaagtcttcagcttggtagtcgtcagggaatgtaacattaacatctacatcttcatcagtattatgaccaatcaattgatcttcaaatcctggaatgaatgagtttgaacctaatacaaggtcgtaattgtcagctttaccgccatcaaaagcaacgccatcaacagaaccatcaaaatcgattgttactgtatcgccgttttctgctggtttgccttccttaagaactaattcagcttgttgttcacgtttcttttcaatttcttcgtcaacttcttttgaagttacacgtgtgctttgcttgataactttaacgcctttgtattcgccaagcttaacttctggcttaactgtaacaattgcacttaggacccaagcttcgcctttttccatgctttcaacatcaacttgtggttgatcaactggttcgataccagcttctttgatagcagcttcataagcctctggtagcacgatgttcaaagcatcttggtacaatgcttcttcaccatacatcttattgaagatttggcgtggaacgtgtcccttacggaatccaggtacgttcaattgttttttagtacgatcgaacgccttatcaacgccttctttaattttgtcagtacctacttcgaaagttaatttaccttcgttagtacctgttttttcccattttgcagtcattgtgttccctccgacagatgatttatttcattacaattctggattgcatacgcttataatcttaacgtatatggtttgaaaagtaaataaaaatacaacaaaaaaacccgcaaaagcgggtttttattaagcaattaagcttagtcgtcgatttctgatacaacaccagcaccaacagtgtgtccaccttcacgaacagtgaacttagtacctttttcaatagcaactggttcgataagttctacagtaaatgtaacgttatcaccaggcataaccatttcaacgttgtcaggtaattcaataacacctgttacatcagttgtatggaagtagaattgaggacggtagtttgagaagaatggagtatgacgtccaccttcatccttagaaaggatataaacttcacccttgaacttcttgtgtgtttggattgagccaggagcagccaaaacttgtccacggacaacatcttcacggttaacaccacgtagaagtgcaccaatgttatcaccagcttcaccaacatcaagagtcttacggaacatttcaattcctgtaacagttgtctttgttacgtcttctttaagaccaacgatttcaacttcgtcaccgactttgatttcaccacgatcgatacgaccagaagcaacagtaccacgaccagtaattgtaaatacgtcttcaacaggcatcaagaatggcttgtctgtagaacgttctggtgttggaatgtattcgtcgattgtatccataagatccatgataactttttcttgttctgcatcgccttcaagagctttcaaagctgaaccgcgaagtacaggaacatcgtcaccagggaaatcatattcagatagaagttcacgaacttccatctcaacaaggtcaactaattcatcatcatcaacaagatcagtcttgtttaagaagacaacgatgtagtcaacaccaacttggtgagcaagaaggatatgttcacgtgtttgtggcataggaccatcagttgcagcaacaactaagatagcaccatccatttgtgcagcaccagtgatcatgttcttaacgtaatcagcatgtcctggagcatcgatatgagcgtaatgacgcttttctgtttcatattcaacgtgggctgtgttgattgtgataccacgttccttttcttctggagcagcatcaatatcagcgtaatctgaagctttagctagtcctttttctgacaacacttttgtaatagcagctgtcaaagtagttttcccatggtcaacgtggccaattgtaccaatatttacatggggttttgttctttcgtaatgttcttttgccattaatacgaacctcctgtatgtcgtaagaatcactcagcattcaaaatgaataactagatcctttaaaaaatattatactacatcctccacgaaaggcaaagcaccgtcagagaatcctctagtattgtataataatcgagtttattttgtaaactaaaatattttattaattcgatttttttcttactcttcaaataagttaatcatgatttgattcaattctttgaacgcttttatatctttcccctcaaaaaactgtttctttagcgctgtaagccattcttctgaggtaggtaggacacgctttgaaaaaggataggaaagctcatatagcaattcagcttgctgctgtagcatttctgattgaactggatcattatagttttcaatagctttttttatttttttccacatctcatcagttcccaataagtcctttggaaacacttcatattctttttcatcaatccaaataaagcgcactggttcctctaatctcatcaaaaccaagtcttttaaaattgaaacacgcgttatttggtttaaaaacggatcaactaaattaaactttgccgcccgtttaaagttactccatggtaaatagtaagctttttcaattacagcagcttgctgaataaccttcttatcacctagatggtaaaaatctcgttcgttttctttcacagttttaggaaaagcaatcgcatattcattttcttgattctcgagaaaatttaaatatttctttaaatctggtgtagtctcttcataatagttaaaaagttcttttcgagctaaactaaaaatttttgtttgaaccagcgcctcaaaataatctctaaaagtatttttctgctcaatgaacttagctggttgatcacgaatcaactcaatcgctgccttaaattgtttattttcaacgtaaaaatgaattaaaacacggattaattcatcatcttgttttaattcattctcagtttcaagaatatgaatagcctctgcacgttgacctgttttccaagcttcatttgctttgctaattacattcatattattcatcgtctttagatttattcgattttttgctcttcttatggtgttggttcacttccataattactggtaaaattactggacgtcgtttcgttttatcgtataagaatttacctaattggtcacgtacatcttgcttcaaatgtccccaatcgaattctttattatcgagattagcttgcactgctcgttcaaccaagtccgaactttcttggattaaatctacacttgttttagcgtaaacaaaccctctagacgtaattttaggttctttaataatgattttcttcttacggtcaattgttactaccgcaatgaaaaccccatcttcagataaaattttacgatctctaagaacaatgttaccaatgtcccctacaccaattccatcaatcattgtatttccgaccgtaattcccttacctaggaacatttcgccatctttatactctaaaacatcacccttggaagcaatgaaaatttgattttcattgagaccaacttgttctgcaagttctttatgagctactaaaagacggtattcgccttgaatcggaattagaaattctggcttaattaaattaagcattaactgtaaatcatctttgctagcatgacctgtagcattagctcggtctgaaatcgacctaacttcggctccagcacgatacaacatatctttagtcttagcaaacgttgtttccatcgcatgggaaggattagtagctattactaccaaatcacctggttgaatcttaagatttcccttttttctagcggccattttttgcaaggctttgatgggttcacccaatttaccagtttccaaaataatcgtttcttctggtttcaacttatctagttggtttaaaggaacaattaattcgttatctggaatatttaatttgtttaactcgatagctgtattaacaatcttctctaaatcatgtccagttaaaacgacttttttatctgatttagctgcagcgtcaatcacctgttgaatccgtaaaatattcgaagccactgaagctacaattacccgaccttcatggtatttaattgtctcagccattacatcagcaatatcagtttcattagatgaacgttctggattttcagcgttagcagaatcacttaaaagcgcgataacttttttacttccaatttgtgctagccgtctgaaatctgtctgatatccatcagtagccgtttgatcaaatttaaaatcaccagtatatacaatttgtccttccgtacaactcaacacaattccaagtgattcaggaattgtatgcgtagtcttgaaaaacgaaacagtaacgtcgccaaaatcaatttctttcttgtcatctaccacatggaaattatcgaatgctttaagttcagggtcatcattaaccgtaattttagccaaggcaatggtcatttctgaaccaaaaaccggtacattaatttcttttaagaaatatggcaaagcaccaatcgcgtcagcatgcccgtgagttaggaacacacccacaattttttctttgttttcaaccaaatatgaaatatctgggattacaatatcaatacccagcaattcattttccgggtattttagtccacaatccaagatataaatatcatcatgaatttgaacagcatacatattctttccattttcgcgaacaccgccaaatggaattatttttattgtgtcactcattttttcacctacataaattaattttttattttccgcacaatacatacttccttaattctagcatagattaaacgccaaaaacaaaaaagcctcctgaattaacaggaggcaaaaaaatataatattaacgacgaagaccaagactcttgattaaatcacggtaacgctgtacatctgtcttacgtaagtaagcaagaaggttacgacgatgaccaattttcttcatcaatccacgttgtgaatggaaatctttacgatgaacacgtaaatgttcgttgatttcgttaatatcagctgtcaaaactgcgatttggacttcagcagaaccagtatcgccttcgtgacgagcatactttgcaataatttcgtttttcttttcttgtgaaattgccatgttaaaacacctcattctttaaattccccaagactgagtaaatcgtcggcagatcgatggactaagtaatgggtttgctattatcaagcagtatctagtttaactaatataatgaaaattttcaagtgcattcaagcattgcaataattacgggtcatctgtataataatattgttgtactaaccatattctggaggtgaataaaatgccagttatcaaatctgcaatgaaacgcgttcgcacaagtgaaaaagctgctgctcgcaaccgctcacaaatgagtgcaatgcgtacaagcatcaaagcattcgaaattgctgctacaaacaacgctgaaaacgctaatgaacttttacaaacagcttacagtcgtatcgaccgagctaagtcaaaaggtttaattaaagctaacaacgccggccgtaagaagtcacgtttagctaaaatgcttagcaaataaaaaaacaccggatttccggtgttttttattttcatccatttttaaatttaactaagaacaactcaaagagttccttcggatctcgttgggttgtttttaattgttcttctaaatcaaccaaccccatataagcattttcgagactttgaatattaaactgacgcacagattgcattgccaacttaattcggtaaggatgcgcctttaactcttgtgctagctttccttgtgagaaacctctctccatcaatattttaacttgcagcaacaatcgaaattggctaactaaagccgcgtttatccttagtggctgttcttgatttaggagtaatacagaataatcatcgattgatttacgtaaatttccttgcattaatacattgattaaatcaaaaacattttggtttaagctcttaggaactaatttttgaacagcattcaaatcaattttctctgttcccgatgcatatacagttaatttctgtaattcattaataatttgtgctaaatcattatccgtccttaaaattaattcatctaacgcatcactgtcaatttctgttcgtttctcatcaacgtattgctggataatcttccgagtatcgctttctttcggtgaattagcatcgataacttctacaatcttttttaagtctttgataattttcttccgaccatcgagtttttcatattttgcagcgattaacataattgtagtaggttccggatttttaatatagctaagcaatccgtccaagttaaactttaatttagttttttcaccagtcaagaatacagggttatttaaaatgaccaaacgataatcgccaaaaaaaggggcagactgtgcatcatctaagaccatccctaagtccacattttcaaggtcatacgttcctacgttcattaccctttgatcttcaggaatgaaatcaattaattcttttttgaccgctttctggatatagttatcaggaccttcaaccaaatagattgacttcaattgcccttgtttaagtttttttcttaaatcagttaatttcattgaataatactttccttttcatctattcctgtcttccatcttcccataccattcaaaaaatatctataagaaatcattccttcatcctgtgtcgaagcgtaaggaatctccattgaattcaagcgatttataacttctagatttggatgtccataccgattatgacgcccagctgaaacaatagctaatttaggtataattacttttagaatttcttcagaattagccgtcttactcccatggtgccctaatttaaaaatatccacccgttgatttaatacaccactttctaacaatttacgttcaccagctaggtctagatcacctgttagtagtaaatttttaccacccacattaccagctaaaactaaagaatcaccattttcaccctttccagcttgaaacggatacttaatttccattggtaagtgatcaattttcgtccccgctaagcacgcaatcacctttgtattgcgtcggataaatggcaatatttttcgttgataattttgagttgtatcaacccccaccggaaaaaccaaatttttcactttaaaattgtttaaaatttcactggcttctccaatatgatcaacatcttgatgcgtcaaacataaattatttaacttagatactcctatactttgtaaataattaattgaactattcttagcgatggtatgcttcattgcaaccggctttttgccaaattgcattttaccgcctgtatcaattaacgttactgttcgattaaacggttcacgaattaaaatgctatcgccttgacctacatcaaaaaaggtgatttcaccatacgggttcaatttaaaccaactccacaaccccagccaaatcagactatagaacgttaacgctcttttcttaaatttactttgctttgttgaaataatttttagcgctaatatcaccatgaataaagtgatcagccgcgaaggtttaccaacttgaattaatcccggtaatttatctaaatatttcaaagttacttcgaacatcataataattggatttaatagcaccattaattggggaattgcaaaagctacaattacgattggaacgattacactcgaaaaaatcggaacaataattaaattaaaaaccatcgttaataagtggattttgtatgttgaaaataaaataattggtaattctaccaaaaataattttattcctgttgtccagctattttccatttgttgcataattaagacaaaagataataaataactaagttgcccacccatctgaagtaagacaaacggattaagccataaattgactaataaaactaagcaccagctatcaagcgtgctaacttttatagctatttttttagttatcaactgaactaaaactaataccaccgcgcgaaataggctagtacttcccccacccaaaataaaatagagggggtaaaactcctatttgggttatctccatcgtttcccttttaattttaaatctagtaaaaacaatttcaattaacttgatgaaataaaacacatgtaatcctgaaatacaaaacaaatgaataatacccatattacgtaacttagtgctattttcttttagataatccgtctgttccccaaggataatccccatacaataactctgtagtggttcctctaactttgtacatcttttcaataattttttacgccaactatgtatcttagcaatcaaactatttttagttaaaatattatattctatcagactagctttactcactttaaaataaactgccttaccatacataatccgtcgaaaatcaaattgatttatattcgttggtcgttcaagcggttcaatattccccttaattttaaattcaactactttttgagttttactaattttttttaaatcgtcaaccgttttaactggaataaaaacttgcaagcctttacggttaagattgttagtatatgctcgaattgaaacgccgtcttccattggcttaatttcatcgggataaactctcaaatcaatttcaatatcacttctactttggttataagtattaattgaatttgctttatgactaaagtgaataaaaaaacagacactaatcaataatgcctgcattaccactgtaagtttttttaaacatatagttctaattaaccaaattattaataataataaaaatattttagctctggtaaagattaatccagacagtaaaaaaacagctactgttgcccatataaaagaaacctcattcaccttctcttaaaatatgattaatattaattttatctaaatcatcctctgagaatttaatctgcttaatttcgacattctttctttttaagagctctacggcatattggtcattatggtaatttctaagataattaattttaataattccggactgtaacaacatttttgtacactgtaaacagggaaaatccgttacataaacttctgcaccatccgttgcaacaccaaacttagcacattgcagaaccgcattcatttccgcgtgtatcgtacgaacgcagtgtccctctactaaatagcatccttcgtcaatacaatgtacgtctccagaaactgaaccattatagcccccagctattactcgccgatctctaacaataactgcccccactgaaagccgcgtgcacgtacttctgagtgataacagggttgcctgtgtcataaaatattgatcccaatcaattctattgtccatatcatttccatccttaatttatacagtaattgcatcttgtagtccttcaaaaattttatcaccaatcccctgtacttgctttaaatcttcaatggatttaaattcgccctgttgttcacgataattaataatttgttcagcttttttatctcctacaccattcaatgtcaacaattctgctttagaggcagtatttatgttaactattttttcagttgaactatcggttgtggaagggctgctacttgaaatactcgatgaaccaactgcacttaattgtgacggatcagaattttttatctcacccttaatcggtacataaactacttgttgatcagacaattgagtcgcaaggttaatatttctttgatcagctgatttagtcattccaccagcaatttcaatcgcatccattattcgcattcccgactttacttcataaactccagggcttttcacggctcctttaacatccaccattattttagaactagcaagtctctgggcgtgagtctccttatcttgtccactcgccattggcgttgcagagtttgagctgctttgtatagaactggacgaactagtcagattgtttccaatcatcttatcagtactatcattacgccccgctcctaccaaaatacaaaaaaacatgaccactattgtgactgttatacctgttattataatttgtttttgatatttttcccaaatttcttccaacatttttgcacctccttagctaacagaagatacaaaaaaagattggaatttattttccaatcctttaaatagtcattttagtcttgattttaataatacttctacagtttcagggactaggcctttaatgcttccacccatttttacaacttctttaattaaactagacgaggtaaattcccacttagaattagctggtataaataccgtctcaacttcttgatttaaatattgattcattccagccacctgaatttcaaagtttaaatcttccccattgcgaacgcctcgaaccaaaacatctgctttttcctgtgtaaaagtttcagccgttaatcctgttaccgatttacaagcaacattttcaaggtctctagtcacttgcgtaattaagttcacgcgttcctgtggtgtaaataaagccgatttgttggtgttaatcgccactaccaccgttaattcatcaaaaattttagcagcacgtttaataatatctagatggccattagtaattgggtcaaaacttccaacataaagagcctttgtcatcgtattattctcccttataaattacaattttggtaattccataatgttgttcacgtacacgatttaaatatccaattttctctggcaattcaacttcatcactgacttcacaaatgataattgcgtctgaagttaataaatttaaaccaattaattcttgaaggtctttctcaattgtttggagtgcataaggtggatcaaagaaggccatcgaatatttatttccttttgtagctaacatttgaataattttcttggaatcgcccttaatgacttcaaaacgatcctttgccttagtcacttcaacattttctttaattgttttaatagcagcaaattgtttatcaatcaacgtagcgctatccatccctctcgaaacagcttcaattgatagtccaccacttccagcgtacatatctagcactaagcctccatcgaaatatggcccaataatattaaatatattttctttaattttatctgttgtcggacgggttttcattcccggtacgggtttcaaacgacgtccaccaaaatcacctgaaataactctcactgttcatcttcctctgctgaataatcttgactatagtcaacccttaaatctgatcgtggagagatatacgcagatctcaccatctcaaatcctcgaattttttttaaagattcctcaacattacttttattaacgtaaaggattaaataatgcatatcttttgaaacataatcaacatcgccaatttttttgatgggtccgatttttttgatgttattaaaaaatacaataatactttgacgttgtactatattcattctaatcttcctctatgatttgtttctgttcattaagtgcttgtctttgcgaagcacttatatttagtagtacccccatggtagccgataaaaccatcatacttgaaccaccataactaatgaaagggaacgtaacccctgtaattggtatcaaaccagttattccaccaacattgaagaaagtttgaacaactagataagttgcaataccataacaaacaagagcatcatacattttactggacctagtaccaagaataattgctctgaaaataatgacaaataggatcgaaatgataattacaaccataatcaaacccaattcctcagcaattaccgacataataaaatcagtattagcttcgggtaaatatcccttcttttgaatactatttcctaaaccaacaccaaaaatcccaccattaccgagtgcgtaatatgaattaaccaactgattaccagcacctttagaaagttcaaaaggatgcgcaaatcctaccagacgttgaagcatataatttgaggtatgcacatcaattttcgaagcaactgtagttaatagtataaaaaatgctgctaatccagcaaatattcccgcaacacttttacgataatttttaccacctgcaaacaaaattacaattgcaattgccgcattaatcgttgaacctcctaaatcatgttgtaaaaagttcaataaaattagcgaaccaatcataaccattggactccacgttaccttaggagaaatttcttctcctaattcaatccgatgttgatgtagtgacaaaatatttgataaatacaaaataataaataacttcaaatattcagccggttggatcccaaaagatccaatatagatccatccagtagctccatttgtattcgaaccaaaaaatataagaaaaaaagacgctgcgtacataactaatgcaccaatttttaatatacctttattcctaaaaccttttttgttaatcaaaaaaaagaacatcatgattacaattccaaccattacccaaactgcttgttttaacagataacttttagcgctaattccattctggatataaaaatcagcactggctgagtagaccattacaattccaaaaatactaagtataagatatgggattattacccataaatctagatacggcaatcgctctttaaatcgccttggaaaccaatataaaaatttttgcattaatatttcacccttatcctgcataatacctaatctattatatcgtactacgctccttaaaaataaaaaaagacgaaaattaaattttcgtcttttcttaattattttttagcagccattttacgtttcttagcagctttttcacgttcatttgtattcaagatttgcttacgcaaacgaatgtgatcaggtgtaatttcacagtattcatcttcattcaaaaattcaagtgattcttcgagtgacatatgaactggtgttttaaccttagcgatatcttcagaaccagcagcacgcacgttagtttggttacgtccacgagtaatgttaactgaaatatcattttcacgactgttttgaccaacaatcataccttcatatacttcagtaccagcatctgtaaagataactccacgatcttgaacagccatgatagcgtaagtggtaactttaccagaattaattgatactaaagtaccattacgacgacctggattccagttcttaatttgtggtaagtattcttggaaagtatggttcataataccatatccacgagtcattgataggaattctgtagagtaaccaatcaatccacgtgaaggagccaagaaagtcaaacgagtttggccattatcagtagtttccatattcttcatttcacccttacgttgtgaaagtgaatcaattacagaaccagtatattcatcaggtgtatcaatttgaaccatttcataaggttcacatagcttgccatcgatttccttgatgataacttctggacgtgatgcttgaagttcgtaaccttcgcgacgaagtgtttcaattaaaattgaaagatgaagttcaccacgacctgaaacaatccatgcaccaggatcatcagtatcatcaactcgaagtgaaacatcagtatgaagttcagtcttcaaacgttgttccaactgacgtgatgtaacgaacttaccttcgcgaccagcaaatggtgaatcatttgttctaaatgtcatttgtagtgtaggttcgtcaattcgtaacactggtaatgcttctggatgttctgcatcggcaactgtttcaccaacgaaaatgtcttccatacctgagatagcaatcaagtcccctgctttggcttcgttgatttccaaacgtttcaaaccaaagtaaccaaacaacttagtaactcggaagtttttctttgaaccatcaagtttaagcacggaaacgttgtctccaaccttgatccgaccgcggaatacacgtccaataccaatccgtccaacgaagtcgttgtaatcaagtaaagcaacttggaattgaagtggttcagctgaagaatcttcaggagctggaattgtatctacaattgtatcaaaaattggtttcattgtgtgttcttggtcagctgggtctgaagaaaaactagaagttccattgatagctgaagcatatacaactgggaactcaagttggtcttcatcagcaccaagttcaatgaatagatcaagaacttcgtcaacaacttcttctggacgtgcgcctgggcggtcaatcttgttaacaaccacgattggtgttaaatgttgttccaaagcttttttcaaaacaaagcgtgtttggggcattgttccttcaaaagcatcaacaacaagcaaaacaccatcaaccatgcgcatgatacgttcaacttcaccaccgaagtcagcatgtcctggagtatctaaaatgttaatttgtttatctgcataacgtacagcagtgttttttgaaagaattgtgattccacgttcacgttcaatcgcatttgagtccaaagcacggtcttcaatttgaacgtgttcgtctaatgtatctgattgtttcaataattcattaaccaaggtagtctttccgtggtcaacgtgggcaatgattgcaatatttctaatatcgtctcttaaattcaatatgtttctccctttcgtttttcaatggcttaacataaaaaaacctgtgacgtctaattcgtcacagcataatgctatttcactatactcattatagcagaatatgcttttttcgtagcaactagtacaacgcccgattttagcacattaatagcctctccgtcaacataccctacttttaacccaaagaccgccgctaaagcgtttccagcagcaaaatcccatggttttaagctagaaacatatccaatttgtttacccaaaagtactcgaataaattcgattcctgcactgccaataactctagctcctagcgttcttttttcaacgtcttggaagtgatatgcattattaactagcattgggccacttaacccgattaaactttcttctagagctagattggctggaggattgattacatcttgatttttatataccactccaattcccggtccaccatgtaataaaacatcacgcatgacatcgtaaatatatcccaacaaaggttttccatcttcatatagagcgatcattacagcaaaatcttcacgttgcttaacaaaattcatggtcccatcaattggatcaatgacccacatcaaccccttggcatcagttaaatcattttcagattcctcagctaaaattttagcatcagggagtaattgacttaacgcttcaataatgtgagcttgattaccacgatccacttcagttaccaaatctcggcggttttgtttttcatcaacttccaaatgctttcccatcttttcaaaaataaattgacgatctttgactagaaattccactattttggcgtctaattgaagtaagaaatctttatctatatttttcattttcaatcaccttaatttttttaatatttaaatcttttaattgtttaaccgctaaaaatggttccataccagaattacttaaaaattccttaaaaagtcttttttcttcactcttattgggcactactgcttgaaacttgcgataactttcaacaaatttttcgcgtttaaccccttcttgataagctttttcaactatagcgaagaaattaattacatcagttaattcggctgtattccagcgttcatcgattgggtaagaaaaagtttcttttatactcattttaatattccttttaagatttattttgtgttaatactatattatatattatacttgttgttagacgaattggaggtttttatcttgattaaaatgaacgatatcactcgtgacggaaatcccgttttacgaaaacgtgctgaaaagcttacttttccgctcgatcctaaatatctcaaagttgccgatgaaatgatggaatatttaaaaaatagccaagatccagctattgctgaaaaataccacttaagagccggcgttggtttggccgctccacagattggtttatcaatccaaatggcttcagtccttgttcctgggccagataataccatcgatttagaagaaacattagttaatcctgtaatcgttagtcaatcggttcaaattgctgctttggaggaaggcgaaggctgtctttcggtcgataaagacgttcctggatatgttcctcgtcacgaccgcatcactgtgcgttaccaaaccttggatggcgaagaaaaaactattaaactccgcgattatcctgcaattgtttgtcaacatgaaattgatcatctaaaaggcactttattctatgatcatatcaataaagaaaatcctttagatattgaagataatgctattttaatcggctaattataaaaaagaagctatgcctgcatggtgaatctcaaaagttaagttatctacttaatttctgactgttcattcctttgtggcatagcttcttttttatagcttactgagatcatttaagtaatctttagtctgacgattaattaaatatacaacgtctaactctaaatggttttgattaagccaaatatctgaaacctttaattgaggtccatcttcgtcttctaattgatgctttcggcaatattccgctagaattttgttgattttagattcaattaatttaatatccatactatgtttgaggttggcgtgataattaaacccaacaacggattgaccccaaacgtctgcgaccgattttccctttgctccatcaaattccataccatccattttaagctgcttagctacttggatcatggcattatttacgattgtttcacttgcatttctaactattgtagccgctttagcaattcttttcctttttatatatgtaagaattaataacactgcaactaaaataattaagaaaattataattaatgacttaattagcatttttgataccagtccctccgcctttcaaggctatgtttctatacttatatcagcctctatgataaaatgtttaaagatgcgttgtagtaatacaacttattgaacgggcaaaacttttatttttatttgaacacatttttacgaaagaaggaagaaaaaaacatgatttttaaagtttattatcaagaatctaaaaaagaaacaccacgtcgtgagaatacacactcactatttattgaagctgaaacgaagccagatgcaattaaacgcgtcgaaactaacaatccagacttcaacgttgaacaagtcgaattgctcgaaggtaaggcactcgaatatgaacaacaaggtgtaaattacaagctagtggagtactaagcttatgggtaaaattaacattaaaaataacgagactgccgtttatgcaatcggtggccttaatgaaattggcaaaaacacttatggtattcaatttcaagacgaaattattgtcgtcgatgctggaatcaaattccctgaagatgaattattgggaattgactacgttatccctgactaccaatttctagttgctaaccaacaaaaaataaaagccttagttatcacacatggtcatgaagaccacattggtggtattccgtttttactacaacaaattaacgttccaatttatgctagtccacttgctgccgctttaattaaaggaaaacttgaagaacatggtctattaaaaaccaccgaaatccatatcattgatgaggatacggtaatcaaattccctaagactagcgttagcttctttagaaccacccactcgattccagatactttaggagttgccgtccacactccttctggggtgattgtcgaaactggtgattttaagtttgacctaacaccgactacacatcagccacctaaccttcaaaaaatggctaaacttggtgatgaaggcgtattgttgttaatgtctgatagtactaatgctgaacgtgatgaatttactaaatctgaacgttgggttggtaagtccattcgtaaaattttcgaagaagtcgagggacgaattatttttgctactttcgcttctaacatttctcgaatccagatggcaacagaagctgcactaaaacatggtcgtaaaattgcggtttttggtcgctcgatggaagcagctttagttaacggccgtgaactaggataccttgatattcccgatgacgcattaatcaatgccgaacaacttaaccatttaccagctaataaagtattgatcatgtgtactggttctcaaggtgaaccgatggcagcgcttagtcgaattgccaacggcactcatcgtcaaatttcaatacaacctgatgacactgtcgtattttcaagtaatccaattcctggtaatactatcagtgtcaataaagttattaacgaattagaagaagctggtgctcgcgtaattcacggaaaagtgaataacatccatacttctggtcatggtggccaagatgaacaacgtctaatgttgcgtttgatgcaacctaaatattttatgcctattcatggcgaatatagaatgttgcaattgcatactgaacttgctcatgactgtgacgtaccattcgaaaatagctttattatgtccaacggtgatgttttagcccttacaaaggactccgctcgtcgttctggtcattttagtgccggtgatgtatatgtagatggaaatggtattggagacatcggaaacgttgttttacgtgatcgtcaattactttctgaagaaggacttgtggttgtcgttgcaacaattaatctaaaaactaagatgattgaatccggcccagatcttttatcacgagggtttgtttacatgcgagaatccggtgaattaattaatgaaggtcggcgtcgaatgtttgcgagaattcgtcacgcaatgcgaaatccgcacgctaatgaagcctctattaatcgggcaattattgatgatctacagaaattcttatatgaacaaactgaacgtcatcctgtaattattccaatgttaattatggattaataaaaaacgcaatcttatcaaactctgagataaatctctaatgattgaaaagattgcgtttttatttagctataattttgctaaacatgaaaagttccctttcccaaattttaaaaggtaaaataaaaaacgtctcaactaacctgggttaattgaaacgtttattttttagttaattttaacgtacgctaccagcaaaacttgggtagaagtatgatgaaattgttgaaaccttagcattttgaccaaatgttggagcatttgcatattggttgttaccaagataaatagcgacgtgatatgttgaaccagcgctaccccagaataataaatcacctggttgagcagctgaaacagatttctttgttacatatgattccatagctacagtatagcttggaagactaataccagctgaatgttggtatacatatgaaacaaatccagaacaatcaaaacctgaagttgttttaccgccccatacgtatgggattgtgttattagctaaagatctagctaaaccagtaacagaaccagtattttgagtagttgttgttgtagcacttgatgatgcagctgaactagcaacattggttgtgttagtagttgttgcagctgaactagtatgtgtagcatatgaaggagttgtagcagcacttgatggtgctacactagttacagcttgtgatgttaccgcactacttgatggtgcaactgagcttgcagctgatgatacagctgaacttggtgctacgctagttacagcttgtgatgtcactgcactacttgatggtgcaactgagcttgcagctgatgatacagctgaacttggtgctacgttagttgcagcttgtgatgtcactgcactacttgatggtgcaactgagcttgcagctgatgatacagctgaacttggtgctacgctagttacagcttgtgatgttactgcactacttgatggtgcaactgagcttgcagctgatgatacagctgaacttggtgctacgctagttgcagcttgtgatgttactgcactacttgatgatgcaactgagcttgcagctgatgatacagctgaacttggtgctacgctagttacagcttgtgatgttactgcactgcttgcaggtgctacatatgttgtagcagcactacttggtgctggtgttactacagtttgagcagctgcactacttgcttgaactgtaacttgttgagtagcttgaggtacatatgtacttgaagcttgagttgctgaaccattggcagcaggaattgttaaactttgtccaacaataattaatgaactgctaagattgtttgctttcatgatggcattaacagatacaccatatttttcagcaagaactgataaactatcaccgctctttacggtaattttagtaacttttgagtctgttttgcctggaatattgatatcttgtccaacaaaaatcaagtgactattttgattaatgttatttagtgattcaatgcttttaacggaaactccgtatttttgtgaaagtgcccaaactgtatcactcttttgtacctttacagaatcagcatgagcaatcacttgtgttccgcctgcaacaagaagacctgctccggccgcaccagctaataataatttggatgcatttgatttagaattggtaaccatataagttcgtccactccttaaattttcgtataatttttatgatttctatcgttaatattcaaaataaattagaattggttttttgcacgtgtttaatactatcatttttaagatattttgaaaacactttttatacattaactattcatcataaattaaaaaaatcttataaatcccgccactacaatgtttaacaaaacttaaaaaaaacaaataacttttgacactttttttcttaaaatcctttatttcatgcatgtttatctaatgttacaccaatattacaaaaaaagagtattgttacaaagaatgtaacaatactcccaagttaaaccatattttttatacataaaaatgaatttttatgcattttttgaattctttactggtttccataatcccataattacaccggctattaccgcaccaattactacagatagaacgtagaataatttatgatcagctaacgcaattacccatataccaccatgaggagccggaacactaaccttccaaagttgacttagtccaccaccgattgctgaaccaataatacttgatccaattacacgaagaggatcagcagttgcgaatggaatggcaccttcagtaataaatgatagtcccagaacccagtttgaaattccagcttcacgttcttgtgccgtaaatttcttaggccaaaatgttgtggcaattgctgtagctaaaggtggaatcatcccacccaccattacagcagccatcaaatcaccatttttagttgaagtaaacgctgcaatcgcaaacgcataagcagccttattaaatggaccacccatatcaattgacatcatcgctgccagtacagcacctaagagaaccgcgtttccggttcccatgccttctagcacaccagttatccatgcattaacggccgcaaacacagggttaactgcaaagaacattaatgcgccaaccaaaagtaaactcaagattggataaatcaacattggttttaaaccttcaagtgtcttaggaacaaatttgaataactttttcaaaccgttgacaatcaaaccagctgcaaaaccagcaattaatccaccaataaatcctgaaacacttgttgtatgcattacgcttgcagctgactgggttgccatataaccacccacaaccccaggcattaacgctggtaaatcaccaattgattgagcaataaaaccggcaagaattgggatcaagaatgaaaaggcataattaccaattccattagggaaagtaaaccacaaactagttgctgacgtatatcgctcaataaagaacgaaagagccatgataatcccaccaccaactacaaatggtagcatatgagaaataccgttcattaaatctttataaatttcattccaaaaaccaccgtttgatgattcagattctgacgcttcatttccagtagaatggaatgtagtagcctgattagcttcaaccaaatcaattaattcatcagctttattaatcccatcaatgactggtcgatttaaaagtggtttaccatcgaaacgcgccatttcaacttttttatctgctgtaatgataactccatcagctcgttcaatatcttcattagttaaacgatgctttacaccttcggaaccatttgtttcaactttgatctcgattcctttttccttagccgcctttttcaaagcagcctcagccatataagtatgagcaatcccattaggacaagctgaaaccgcaacaataaaggactttttttctgaatcgactggttcagttgtttcagcatcatgtgaatcttctacatcttttgctgcttctgcagcttcaaataatgccaaaacatccgctggagtttcagcgttcttcaattttcctaccaactctgggtcaatcagcaaactagatagtttagctaaggcctgtagatgcgcattattcgccccctctggagcagcaatcatgaagaataattttacaggttttccatccaaggcatcaaaatccaccccattactacttttagcaaataacaccgctgcctcattaacagcattagtcttagcatgaggcatcgcaatctcgtcaccgataccagttgttgattcagcttcacgatctagaatacctttaagataggtcgcacgatcggtaacaattccttcactaacgtatttatcaatcatttcgttaatcgcatccgattttgaatctgcttttagatccataatcattaagtttttcttgagtaaatctttaatctccataattttaccccttacttttcaaagacatcaatttcgttaaaaatctcgtcaatttttttattagttgcaatatccagtgaaaatgctgtggcacttccacacgctaaaccttttttaaaggctttttctaaatcatgtgactgattgaattctccaacaaatccagccaacattgagtccccagctcctacagaatttaagactttgccttttggagcaaaacttctaagcacacgatccttggaaactagcattccaccttcaccagccattgaaatcatgacattttgagcgcccatttcaattaactttttagcatacttctcaatatctgcatcggtggttacttccgtatgaaataattctccaagttcatggttatttggcttgataacgattggattattttctaaggtatctaatagaccctgtcccgtagtatcaactgcaaattgcgccccatttgccttaatttttttaattatttgatcataaaggttctgaggtaaattggctgggatacttcctgaaaatacaacaacatctccattgccaatttgattaaatttgtcgataaaacttgctaattctgtatcatcaatattaggcccgagggcatttaattctgtttcttgttgagcatgaatttttacattaatcctagtatcttctttaatctcaacaaaatcggtttgcacattcaaccttgttaatacatcattcacaaatttcccagtaaatcctcctagaaaacctaacgctgtgttagacacatttaattcatttaaaattcttgaaacattaatcccttttccacctggaaatttacttgatgtcttcaagcgattaaccaagccaactttcatttcatccagactgattacataatcaatcgatgggttaagtgtaactgtgtaaatcatttttgaacctccatataatatatattttcctctgctttgagccattctggacaatggtcggcaataattgttgcatcttgcaattctgcaaaacgtacaaatgaagtcttattaaacttagagctatctgctaaaacataagcatttcgacttcttttaatcacttctgacttaatctgggcttcttgaatatctggagtggtaaatcctaattcttgggataccccattggttcccatgaaacatcgatcaaattgaaatgttcgaatccgatccgttacctctgatccaatcaaagcccgggttttattttttaattggccaccaactagatacgcattgatatcaaaatctgacagtaatccagcaatcgtcaatccattggttacaactaacagtccctcgatttctgccaagtatggaatgatcgttgcagtggaagttccggcatccagaaaaataatctccccactttgaaccagttctgcagcttgtcgcccaatttcatttttttctaatagattcattttcgatttaacttgaaaatccgtttcggtttgaagcccattttcaagttgagctccaccatgaacacggactaactttccttctgcttcaagtttttttaaatctcgacgaaccgtagaaattgatgattgatttgcatgcataatttcatcaactttgataacttgtttctctcttaataaacgtaaaatatttcgttctcgaagttctgtaagcactttcatcaacctccatagaagaatataccatcattttagttcaaaatcaatcaaattaattcaaaaaaattcaatttcgttcattttacatcaaaaaaagacgcctatcacttgatagacgacttctaaattattcaatttcactttcaataacttctttagggtttctaggatgatgctgctttaattgaattcctaataaatcaatgaagaaagcgacggtaggaataccaacaatcaaccccccaagttcccaacatttttgctccaataattaaagtaatgaaggttacaaagaccggcaaatcagtggcacccgccatcaaccttgggtgtagaaagtatgattcaaaaaagtgtatcaatattactaaacaaagcacttctgcaattgagataataccattggccgaaaaagcaacaattgacaaggggattaatgaaattaaaactccagcaacggggactaaacctagaataaagacaataatagccattaatagcagtttaggcaccccaattatccataaaccaatcaccatcaaaccggtattgataatacaaattactaattgggtttcaattaccgtacctagtatcactacgtacttacgaagtaagtagtatacatttccgaacatgatatcatacttactctttaaaatagcatgcccaaattcacgtaaatggttgtaagttaaattaaataccatacttagaaataacgcaattataacgtgttctgcagcgatcccgattctgccaagctgatttaacccagacattgcgatgtattgacttcctttcaccgcttgtgagtttctatttatctcagtaaggattgtttgaacatagtggttactaaacgtatcactgtcaatagcatgtttaattaaagaaggaattccttttaattgatcgtaaatcatcgaggccgtaaaagaaaaaacaaagcccgcaaaggccagtaaaacaatataaaaaattattgtaccaattggctgactaaccttggtgtattttctaatcttttgaattcccacgtgtgacacaaaggaaaaaattactaccaataaaatttgcgacataaaatctcttaataaaaatattatcaatattagcgctactagcgttgcccaaagttgaacagattttttatgccattgttgaactaatatatccattgaattcctccaaataaaaagacctgcacaaattataatctgcaacagatcttaatcgaaaatttaaaaagttatttaacacttatttaattatttttggcttttaaataatggagcaagtggttcattatcataaatcatcttaattgcatttcctaaaagtggccctacagataattcaactaacttatcaaatttcttatcagcatcaattctaattgaatcagtaacaatgattttagacaatttggattcttgtaaaattttaggtgcattattagaaaagattgcatgagttgcagcaccatatacctcagttgctcctgcgttatggagggcttccgctgaaatcgtcaagcgtgttcctgtgtcaatcatatcatcgacaaccaaagcaattttatttttaacatttccaatgatttcagtcggaatttcattaatactttctacagattcttcattacgattatcaataattgcaatgggtgtgcctaataattcagccatggttctagctctagaaacactagcgtgatcaggtgaaactacaaccatattttcgacatcaaaactcccatcactaaaataacttgctaacaatggagcagcggcaagatggtcaactggaacatcgaaaaatccttgaatttgtggagcatgtaaatccagcgtcagaacacgagtaattgcatcatcttccaaaaggttagcaatcaatttagctgtaattggttcccgtgaacgagctttgcgatcctgtctagagtatccataatatggaataacaacattaatttggctagcactagcacgacgcaaagcatcaaccataattaataattccatcaatgaatcattaatagggtctgaaatggattgaattacataaacttcatccccgcgaatactttcttcaatatttacttggatttcgccatcactaaattgcttaatagcagcttttcctaaaggcattcccacctctgcagcaattttttcagataaagcatgatttgaattcaaggagaatattttcattcttctttttgttttactttcttccacagctgaacctccaattattatctacctatcattatagacaacttaggctacacacttcaagatattaactaaataaaatcatacggggtgaccccttccattccaatcattggatctacctgttctttttgaaccatcgacgtagttaaatactttggttgctctacttccactggttctgacgttgattgctcttgatcaactggttctgatacttgtatttgttttactttttcagctaaaacttctgcttgcggattaattcgacgttctaaactggtatttcgattagatgattcattgcttaccgctctttggtaagcatcaggttcacccaacaaaataatcgaattggacgcacgagttagccctgtatataagaggttgcgttgtaacattcgatagtattgatgcaccataggcataatcaccaccggaaattcactaccttgtgatttatgaatcgaaatacaatatgccaaggtcaattgtccaaggtcagttttagcatacgtaacttcatttccatcatagtcaacgactagatgagctctacctttgccttgcttttccgtaacaattccggtaatttcaccaatatcaccattaaagatattattttcaggcgaattaaccaattgcaaaactttatcaccaattctaaaagtttgattgccagattcaatttttttcggtttatccgtttgaggtggatttaaaactttttgtagatgtcggttaatttcatctactcctgcactacctcgatacatcggtgctaaaacttggatatcattcttagaaatccctttatctacagccttttgagcaatttgatcaatcgcatcggcaatttgattagcgttagctagaaagaaggatttatcttttttatttttgataaaatcttcaggtagtacccctttttgaatgtcgtgggctaactgaataatcgatgaatcttgttcttgacgataaatttttgtcaatgaaatggttggaattttaccacttttaattaaatcattaaatatttgtcctggtccaactgatggtaattggtctttatctcctaccaataccacttgcatatctggattaatggcattaaccaacgtactaaataatccagtatcaaccatagacatctcgtcgataactaacaaatcgccttcaagctgctttatttcatcattctggagatcgtcattaccatttaaccctagcaaacgatgaatagttttagctggtacattcgtaacttggcttaatcttttagctgctcgaccagttggggctgctaactgaatggggaatttactttccgtgtattcgttaatatccaacgaaatatcatttaattctgcaaagctattaattaaccccttaacaattgtagtcttccctgtccctgggccaccagtaataattgtcatagggtgtgaaagtgcaagttcaatcgctgcattctgcgtatcatcatactttaaatttagattcttttcagcggctttgattgcccgcttaatacctttaacgttcgaattcgattcaccgaccatgcgtttaacgttataactaatagcgacctcagcattatataaccatttcagataaatttggccgtcctcacctacgacttttccatctttacctagctgtaaaacttgatctgcaatagcttcagcatttacagccgtacctaaaagctttcgggcttcttggagtagcatatctgccaaaatataggtatcacctgtggcattacaccaagttttaattgcttctaagattcctgcttgaattcgtttttcaaaatccggtttaatatttaagctagcagcgatagcatcagctcgtttaaaaccaatattttcgatatcctcgaccaatcggtagggattctcttcaatgatgttaattgcatcctcatggtatttatttacgatactactagcaatttttcctgtaatccccatatcactgagctttataagaatatcctctaatccattggactggtccaaaaccgatacaatcatatcaatttgcttttctttaaggtttagaccgtttaaaactccagggtctttcttaatttcattaagtgcatccgatcccaaagcttcaacaattttttcagcggttttcgttccaattcctttgaattgtgatcccgacaaatatgtaacaacaccatcttctgtatttggcataaacgctcgatattgattagcttgaatttgcataccatacttaggatgtgcaattagttttccattaaattgatacttctgtccttcttgtacgtcaccaatatttccagtaacaacaatctgctcttcggaccagtcaaaatcatcttcttctacagtaaccaggagcactttaaataaactatctgggctctcaaaaaagaccgcactaatttcaccaatcagttcgaccatcttattttgagactgcttttttgggtcagcatcgccaaataaattcattttctcaaatgccattaaacatcttccttatattcacttagtaatttatcgatatcaattaatcgttgtttgctactttcaaaatacgttttatcaattttttttgcttgttcaaaataaatgtttgttttctttttagttaacgtcatttcaactacgccacggttaaatagtaacttagctgtatttttattttctaacgccgtatcataatacttttgggcccttggagcatcccctagggctaaattaacatcacccattaattcatttgtatcagcatcgtggggattctgttctaacgcagttagtccaaaagcaaaagctaatttgtactgactttgagcatagtaaccctgagcaatcattaaattagcatctttttttagatgtgcatctttaatagtttgaaattctacattagccttctcatagagtccagattcataataaacattccccaaaccgtatgttaataaatcgacgctatgcgaatctttaaataaacctcgagcttttactaaaagttcttcagcttggtcaaaactttgttgtttaaccaaaaccgtagctaacgcataataattttcagcttcttgcggattttgatcgattctatcaatcaaatctttaactatatcttgttttttcttatcttcagtcattttttcacctacattaaattacatctgttgggtcgatgcgcttctttaagtaactagtattattccaatcaactaattcaaaagactttcctaagtcattacttgctaggacagtcgtactcgtattggctaaaccgccacgtttccttaaatcagctaacggaacctctaatagtgaattaattagagcatttaaagccgctccatggcttactataattacattatcatttttagcaggatacttttcacaaatacgcaaaatagtaggtttcatacgttttactaaatgttgaaaagtttctcccttaattttggtaggatcataccgatctgggtggtttctgaatgcatccacttcatctgtatattctcgctcaacatcgacgaatttcattccttccataatacctagattgaactcttttaacctactagaaatagtaattggcgttggataaccttgtaattcatccaactcatgttgtaatgtcgtagctgttactctagcacgtcgtaaaggactggcataaatatgttgaaatttattaggtgcaagaaaactagctaattgtgaaatttccgtgtagctttctttcaatagtggagaatcaccattggcaccttgatagcgtccctctaaattccattctgttttaccgtgtctaataaaatataatttcgtcaaaattcttgtccttcttttacatagttactaataattttaacattaaatgaatcctaggttaccaaaaaacaaaaaaagaaccagactaagtctgattctttttaaattagatgtattgtaacatcttcttttcactattgtatgcagcatcaatgattccgccaccaatacattcctcaccatcgtaaagcacaagtgcttgtccaggagtaattgcacgagctggatcatcaaaatctactgtaacttttgaaaagtcttcactaaaatgaactgttacaggtacatcttgcgcacgataacggaacttagctgtacagcggaaatcacggcctcgttcttcacctaatttattcacaaaatgcatgtcagatgcatccaaactagcagcataaagatgactgttttcaaaaccttgtccaacgtacaagatattcttagaaagatccttaccaactacaaaccaaggctcgttattcttagatccaccaccgataccaagtccacgacgttgtccaatagtatagtacattaagcccgcatgctcaccctttacttcaccatcgagtgtcatcatcttaccagccttagctggaagataatttcctaagaattcgcggaaatttttctcaccgataaagcaaataccgacagaatccttcttatcataaactgatagtccagcttcttcagcaaccttacgaacctcaggcttaatcattccaccaagtgggaacattactcgatctaactgttcagcacttaattgacttaagaagtatgtttgatccttattgctatctgtagctcgaaggagatgttggtgaccattctcatcacgctcaacttgggcataatgtccagtagctacataatccgcacctaaactaatcgcatagtcaaggaaagctttaaacttaatttcattattacaaataacatcaggatttggtgtacgtccttttttgtattcatctaagaaataagtaaacactcggtcccaatattccttctcaaagttaacagaataataaggaataccaatcttagctgcaacttttgcaacatctttataatcttcggtagctgtacaatacccattttcatcagtatcatcccagtttttcatgaaaacacctactacatcgtatccctgctgctttagcaagtatgcaactacagatgaatccacaccaccactcataccaacaacgacacgtgtcttactgttgtcagtcatatttatcaccatcatttctatcagattctggagaatctacgattgaaggtcgcataaatccagtaaaatccattttataccaaacacttattaaattccaccattaacaaaaagttagtaactattttttagccaatacttctctttcaagtaattcttgaatcaaaaaatggtactgttcaactaatggtgcatcctgttctcgactaaaaatgttaacactttgcattccattagccgtggttgtactcattttaaatccagagaaatctggtttaatcattatctttaatttaatcccttggttaaagggtgaagttgaatctaacgaacgttctaaaacgaatgttccattattcttagtcgtgaatcctaagtctaataaagtatatttttttatattagcatttaacgtgtaaatgacattatcacccttaacattcacttctttagtaaaagccatctgaacccctcgcttctatttattgcttatttgttttaatcgttgttcaattgctacaatctgatcacacagatactcaatatcttcttccgtagtctttttaccgaagctaattcgaatcgattcactaatacgaggcgaatcctcaccatacatcgccgtcaatacatgtgatggttctaagcttccagcggtacaagctgatccacctgatatagcgattccggcaagatcaaggttagtttgcattacgtaagttgaaactcccttcaaccaaatgttgaaaacatgttggaggttgttctcatctaacgaaccattgatttcaaattcagtttcattttcttttaaagtttgaatgattttttgcttaaaaccggcataacgagcctgcaattgattcttttggtctgcatcaagcaaactaacagccttagcaaatccagcaatattggcaacattttctgtacctgcacgccgcttgtcttcttgttcgccgcctaatataaagctatcgaaattaacttcgttgttcttatacaagaagcccatcatttttggaccgttcaacttgtgggctgaagttgataataaatcaatgtggtcacgcttaacatcaatatctactaacccgtaggcttgtactgcatcggtatgcaatactgcttgatgatttttcaatatttcaccaatttcatgaattggcatatggctaccaacttcattgttaccagtcataatacttactaagattgtttggtcatctagcgcatttttaaattcatccaaactaatcaatccattttgatcgacccctaaataagtaacttcaaatcccatactttctaaacgacgcatggggttcaaaactgatggatgttcaattgcagtagtaataatttttttacctttatcttgattacgtaaagcgacttgtgtaatagcagtgttattactctccgtgccaccactagtaaagataatttcatcatcattcgcatgaatactttgtgcgattatatgcctagcttcgtcaagtgtagctcgagctcgacgaccgaagccatgtaaactagatgcattaccccagttatttaataattcattagatattacttcaactaccgcggcatccgttggcgttgtagctgcattatctaaatatacttgttgcattatttattcccttccatcttaaataaatcaatcagcattgatgcggagcgctttccagcgtcaataataaattcatcaaaagaaacattcgcatcatcactaccggtatcagacatagcacgtaccacaataaatggtttgtcaaattgatgagccacctgtccgactgccgcaccttccatttcacaacataaagcatctggaaagttttttagaatagttttaactttatcagcactagcaataaattgatcaccagtaacaattagacctttttttgtatttaaattacgattctgagctgctaattcaaattgatgaattaataacgcatcagccttaaatctagcactgtcttgttgtgggagttgaccatattcatagccaaatgctgttgcatctacgtcgtggtacgccacttcagttgatagcaccacgtctccaacttctagtccttccccaattccgcctgcagaacctgaatgaattaaggcatctgcgttaaaattggtaactaaaattgctgctgtaattccagcctcaactttaccgattcccgaacgcactagaactacatctacattactaatttttccttcataaaaaacgattccattgatattggtttctttttcaagttctagcgtgtcaagaagcgtcttaatttcttcttccatggcacaaattacaccatatttcatactttattcacctatcctacaaaaaataaaattaagaaaactaatatgattccaattcctaatcctgctattgcgatgtttaacttcttagccaatgcccggctttttgcttccgactgttcgtctggattgaaacgctgatctttagtctcacgctgttttctttggctacgtgataattcttcatctacagtttgctctgcatctatttgttctgtttctttttgcaaactcctttgatattcagcacgagtttgttttttcttatccaaagcctcacctacttaatgttagccttccaataataaatggctaaaattgtttttgcatcttcaattttaccttcagcgacagcttttaatgcctcatccaatgaaagttcaaaaatatttaagttttcaccttgatcacgaggaagttccttagtgactttctttaaattggttgctttatacaaagtcatatattcatttgaaaagcctggagcagaataaaaaccattaattttttcaatcttctcagcttcatagcgggtttcttcgttcaactctcgtttggctgtctcaagtaaatcttcacccggttcaactttaccagctgggatttcaattgttaacttgccaattggtgtacgccattgttcttcaaagattgccttaccgtcatcggttaaggctaaaactcccactgctccttggtgtttaacaacatctcgattagccaattcgccgtctggtaatttcaccgtttgttgataaacatcaataacttcgcctttatatcttgaaatagactctactactttttcttcaaaactcattattattcaacctcctcacgaaaaactttaaccgcgattaatccttttggcccatctgcaagcattaacttaaccttttcaccgacttctaaagttttataatcttcagattgaatgaccgtgtagtgcgcgaatactttatctccactagctgtttcaataaatccataccctttttctttatcaaagctttctactgttccagtttccaaaatttcagctccctttttatgtttgtcatactaccatcataatggtggaaaacacttctgtaaattaaaaatgattaggttactcgcctaatcattcttaattaattatttttcttcaaatccttcagtaattgtttcagggtaattttcagtaacgatttgggcacaactagcacatagcgtagcaaagtgttcgtctgaaccaacatcagtttttgtcattcggcaacgttcgcaaacttccccttgagcaggtgtaatttcgactgctaattgatcgtcaaaaattgctgtatcttttggagcttctgataatgcctttacttctaattgtgaaacaatcaaaatcaaacgtaaatcaacccctaatgtatctactaattgcttagtggattcatctaggtataaggtagccttagcttccattgatttaccaatcattttactatcgcgagcttcttcaagcgcctttaatacatgtgagcgcagttccttaatactttgccatttacttagtaaatctgcaccatccgtatagttagcaacttccggcatttcagctaattgaacaaattcttctggttcacgaaggtattcccaaatttcttctgctgtatgtggcaaaattggtgtaattagttttgttaacccaaccagaattttgtagaaaacagtttgcatagaacgacgtttcaaactattttcaggttcaatataaacgacatctttagcgaagtctaaatagaatgcagataaatccgtaataacataattcaacaatgttttgtagatgtcgataaagtcatagttatcatatgaagtacgaatcttactaattaattcattgaactgaactagcatataacggtcttctggacgcaattcattataatctacgccattttcctttggatcaaaatcagatgtatttgcaagtaagtagcgaacggtattgcgaatcttcttatatgattcagaggcctttacaaagttttcttgagaaactcggacgtctgatgaagaatcaattgaagaaacccagagacgaatgatttcagcacccatcttcttattaatttcatcaggaacaatggtattaccaagtgatttactcatcttatggcccttaccatctaaagtaaatccttgtgaaataacttttttataaggagccttgcctgatacagccacgcttgtaatcaaactagaattgaaccaaccacggtactgatcagaaccttccaataccaagtcagctgggtattcaagataatcgcgttgtgccaaaactccttgatgagatgaccctgaatcaaaccaaacatccataatatcattttctttagtaaactcgccatttggtgaatgctcgttggagtagccttctggaagaagatcctttgcttcccattggaaccaaatatccgaaccattcttctcgaataaatctgcaacgtgattaatcgtttctttttcaagaattggtgtaccatcttcagcatagaaaattggcaaaggaactccccaaacacgttgacgagagataacccaatcaccacggtcccgaatcatattgtgaagccgcttttgaccccagtcaggaagaaattcaacatcttcaatagcttccaaaatctgatcacgaatcttatctacagatgcaaaccattgaggcgttgcgcggaaaatgattggtttcttagtccgccaatcaaatggataactatgcacatagtccatttgttttaataaagcattagaagcttttaatttgtccaatgcaattgcattagcatcttcataaaagacaccttcaaaatctggtccagcttcagctgtcatgtagccacgatcatctactggtacaaaaatatctaatccatattccttacctacacggaagtcatcttcaccaaaacctggtgcagtatgaactaacccagttccagaatccaaagtaacaaaatcacctaacataacaactagttcgcgatcgttatcaaatggatggatagccttgatacggtctaattcacggccacggataacttgaagggtttgaacatcttcccaaccaaattgttccgcagcataatttaaacgatctgtagcaatcacaaatttacgatcttcaccggctggttgaacaactgaataatcaaaaccagcatcaatcgtaattccttctgaagctgggattgtccaaggtgtcgttgtccaaactacaaaataagtgttttcatcaagaacgccttttccgtcactaactttttctgcgtaaaatgcagatggtgaagtaacatcatgatattctacttctgcttcggccatcgctgattcagatgaccatgaccagaataccggcttcttaccacggtaaattaatccaagctcggccattcgaccaaatgttctaatttcttgtgcttcaaattccggattaagtgtcaaatatggatgatcccattcagcagaaatacctaaacgtttaaaatcagtacgttgtttatcaacctgttttaacgcatattcatgacatagctttctaaaatcagctgtagacattttttttctgtcatagccttccttagtaagctgttgttcaattggaagtccatgggtatcccagccgggaacgaacgggcttctaaaaccactcattgacttgtaacgaacaataatatcttttgaaatcttattcatggcgtgtcccatatgaatatttccatttgcatatggaggcccatcatgtaaaacgaaggatggtttgccttcatttaatttttgacgttgttcataaattttattttcagcccagatatcttcacgtttttgctcattaactggaagatttccacgcattttaaattttgtttttccaaggtttaatgtatctttaactcgcactaaaaccactcgcctttccaagtaaaataaaaagactccatcccttaacagggacgaaatcttcgcggtaccacccaaatttaaagaccattaaatggtctttctctttgtagcacttaacggttgccaaccgactagatttactgaatttcaatctagcactcaaaagtgatcaaccttcaaattacatactgacctcccaccgtcgtcagctcgctaagatgctacattttgaagattcttcttttttaacgttttattcttttggtttaacatggaatccttcactagttggattaccattctcattattgtagtcttctgggaaaactacaacggtttgttgatcatcttgtacttcaggttcaactgctggagtatctggagtaacttcgacaacttcttctgagtgtacactctcatcttggaagttgtcaagcgtaccactattacgcatggcttctttaatttcaccaatggtgagtagttcatctgaactaagcagattatcccagtcacgtcccttaatcatttgaagttgtgactctagtaaaacttcaaatttttgacggaaactacgagcttgcttcttcaaatcatcagtagcaattacaaccttttgagctttaccagccgcttcaccgatgtaactatcagctttcttatgagccgcatcaattactgacttagcctctttctgggcttctttagaagtaaattcggcttcgcgttttgaactgattttgactttatcagctgcatcttgtgccaccataattgacttattgagggattctttcatctcatcaaaataatcaattcgacttttagcctcgttaagttgtgaacgaagtgtatcgatttcatcatgaagacgacgctgttcaaacgcaacttcgtctaaaaattcatcaacttcgactggattgtatcctcgcattttatttgaaaattgtttttgttgtatatcttgtggttcaattgacattttaataaaacccccataactcactatctagttttgattatatccagctggatcttaagtttatctttttttgtttttccaagaatatcaacaagttttatcctaccatattttcgaactgaaataacatcatttaacgcaattaaagtatcagctttctcatcaatcatccaatttaattgaactaaacgtttttcaatcagttctttcactcgatgacgagagatcgaaaatcctgttgaaataattgaatccattcttaaagatgctacagtctggttaacaggctcccaatcatcttgaacttttaaaatatcatttgttgaagtaggaatcaatttaacttttattttaccaattcgatcaatttcatttaaaaagaaattttctaattctccattaacagcaaattgccagcattctgcttgatgaactatatcaccaaaagtacttcgtttaataccagcattaaccaatgttcctaaaatctgacgatgttctaaatctgtaaaattaattggataattaatttcaaagattctaacagaaaaatcatcttccgcaggaacaaaataatctggtgtaatcaatgctcgcttattttctgcctcgctaaagcctccattaaaataaacctttagttcaggaaatcgattaactagggtttggagaatatgttgttctcggggatttaaaaaattagttaaaattggacgattttgatctaaagcctcttgtagtgaagatgaaaagctctcaattaattcctgctcttcttttctaaaatgctgtgtaatttgattatccatagttaaattacaccaagcattaaggtttcaagaaaaactaatccatttgcacacagttcaagaactaacaaagctaatatcggcgaaaaatctattccaaagataggtggaataaatctaaaccaactcatataaggctgacaaattttagtaagcaactttcccaagccggattgataagctcctggaagccaagacatcaaaacccacacaaagattgctaacatatacaattgaatggcccaatgtaacaattggaagattactgtaatcattattttctatcactcatttcaatattttgtcctaattgcaataaacgggcttgagcttagcccaaacccttttattatattttatttgccgcgacgtttgaaaaatggaggtgtatccaatgaatcatcgtcagagctaatgttgttattatcgttaaaagcgttgaattctttcttttcaacatttctaaaactatcgttatcgcgtgaagtaggacgaaccccatttgaagcatttgattgacgtaattgccagtcaccaaatggatcatcagcagcttgagtaggttgttcactattagatgacgtgtttaaactttctgtagaaccagcaccgcgaatttcagtattatttgaaacatttgttgtagcagtatttacgctactgcttggtgtttcaaaagaggtgcgtgctggttgacggtgtaaagacgctctaccagcttttttatcaatacctgtagcaattacagttactcgtaccccatcttgtaaatcattatcaatagaagtaccgaagatgatatttacatcatcattagctgcttccgtaacaatttgtgaagctgcttgtgcttcaaataatgaaaggtctggaccaccagtaatattaagaagaacttgttcagcaccatcaattgaagtttcaagcaatggcgatgaaatagccttctttgtagcctcttctgttctgttttcgccgctagctgagccaattcccataagagctgagccttgattttgcataactgtcttaacatcagcgaagtccaagttaacgtagccaggtgatgtaatcaaatcagagataccttgaacaccttgacgtaatacattatcagcttcgttaaatgcttccatcattggagtttttttatcaactaaatctagtaagcggttattagcaatgataataagcgtatcaacatgttctttaagatttgcaacaccttctgctgcaaatcgagcacgtttaggtccttcaaatgtaaatggacgtgttaccacacccaccgttaaagcaccttgctctttggcaatttgagctaccataggtgcagcacctgtaccggtaccaccacccattcctgctgtaacaaaaatcatatctgctccttcaagagcagaggaaatggtttgttgactttcttcagcagccttagcaccaacatcaggtgttgaaccggctcctagacctttagttaacttaggtcctaattgaatcttaacgtctgcgtttgaagcttgtaaagcttgaacgtcagtgttagcaacgataaattctactccctttacgccttcagcgatcatgcggttaacggcattcccaccaccgccaccaacaccaattaccttgatgtttgcgcctgtacttttactttcgtccattgaaaattccatgttaattcctccatcgattagttagtcaaagaaatcactaaaccattttttgataccatcgaagcgatttgagtttgctgtgcttgatgatgaattattagttgttggcttaggccgttcttgttgtggttcgggacgtctctctgatgattttgtgcgttgtttaaatttaggcttttcatcaacaacatcatcttgcggtgtttctgatacggttctttcgcttgaaaccattgctgttttagctaaaatctcaacatcgctcatgcgaccttcataattcaaaatagcaagagcttgcgcaaaagcaggatgtcttagacccatttgatctggaacatatagtttagcatttgtttcaaaaattctttcaactaacgtttcgattccaggaagggcagctcccccgccggtaatgacgacaccacccggcatatccagagcccctactttttctaattgtttttttatgttagttaatatttgttccattcgagcttcaataatttcacttaaatatttctcagtaactgcaaccggttcattttgaccaacaacatttactggaaatgcatcactacttgcttgatcagcaacagcataaccatactgttgtttaatttgttctgcattatctaacgaagtatttaatactaccgagatatctttagttacaaattgtccgccttcttgttcaacgaacgtgtacttaagatgatgatcatggatcacagcggcagttgattgtcctgcacccaaatcaagggtaatcgtaccaaaatcttgttcaccatcatttaaaattgttctgccaagagccagtggactaacgactacatctactaatcctaaaccagcttgacggattgcgctctttaaattatgaataatggtcttaggaccagtaatcaatcccccattcatctcaagtcgaacaccgaccattccacgagggtctttaatgccatcaaaaccatcaacgataaattcgtcaggtaaaacatcaaccacttcctgttcgggaggaagattatgtactgaagctgcatttgaaacttcaactacatcttgatttccaatctcccttgagctatctgagatagctatcatacctctgacaggttctattcttaataaattagctggaataccagctactacgtcgtggatttgaatatttgccttgcgttctgcagactcaacggcccttttaattgcaattgaggctttgtcgatatcaacaataacaccacgatttacaccatctgagggctctcttcccacaccaataacgttcatttgtcctttgacatattcagcaacaataacttttattgaggtggttccaatatccagtccaacgtaaattcctgaattatccataataaaggaacctcctagtcgtttaaccgtttcttatatatatattcatcacatatattaaacagtttaccatattaatatcaattcttgtataaaaataggaaatacttattcataaacaattattttttttaatcagctccaaaactgatagtttttcaattaaaaaacttattctaacgcaaccaatagcacttaaaaatcgtttgaccctttagtggattaaacgatttttatctaagagcatcttatccatcttaagtttcaatttgatgttaagaataaattaacagatttattaatctatatcttgttgagtatttactgtactttcagcatttgagctttctaagtcttctttactttgtgagcttgctgaattaattgtttcggttgaatctgctgaaccactggtagaatcggcactttcactattttgtgtcgttttttcctgctttttagctttgctactagattcggcacttttagacgattcactggctgctttagcctcatctgtccaaccgctaggtctagaaaaagctcctacttgtaaatcaaccattccccgttctttcatacttgctgaaatttcggggtaatacttcatttttttagcaaatgtactcataatagcgtacacttgatttccatcattcatgaaaaaatgtagacgatccttaacatttttagtcggtgaaaaatcgacttctgctacatcattttgaacactatttggcatctgggcatattccttcaaaaactttttaagtgtactattttcttggaaatttctgaagattgggtaatccgaacttggttgactaacactcttcctaacaaccgaaccatcttgttttacggtgtaataagtcttgtttcttattacatatcccatgaccgcgttttctttaactttaattttaactttgccactccatgaaatggatacggtagcatctttgatgtctgtatttttctttaaaagattattttcaaattttccttccttaaatacggaagttaaaattacatcattttttttgatagacacattttttaaaattttagcagtggaaacacgcttattaccgcttacactaaatttttgaactcgactaattgaagaataaaaataaccaaaaaataaggcgatcactatcaacgtacttccaattaatattcccagtttttgtctggaaagccgttgttcttttactattcttttggtgccttttttatttgattttttaaccttgtttcgattatttcttctaaaagaagcttgaggttcgcgtggatttttcgaagtggctttgcgtttccgcttaaatctgcttctactatttgcattatgttctttttgatatttggcccacggagttaattcttcatccttcttctttttcatcttactacctatatctacttactaaccgatttcaaaacatcataaagattttcagcagcacgtggttgacccattttcttagcgttttctgccattacgtttcgaaatttctgatctagcatcaatgtatcaagcgtattaatcaatgcttcggaagtaagatcactttctttgataatctctgctgcatcattattaaccagactcattgcattttttgtttgatgatcattggttacatatgggctaggaattaaaattgacggtattcctaaagaagtaatttctgctaaactagttgctccagctcgccccacaattacttccatattggaaagaatttctggcatatttgcaatgtaaggtaaaatagctattttgccttgatatttagccaaatcaatatctttggttaaacgttcgaaatgaactcttcctgttacaaatattgtttgatatggacgttccattaattcttccaaggtgtcgatagtgacctgattaatcttctcagctccacggcttccaccaaaaatcaatacggtaggcaccttatcgtctagagcaaattgacttagtccacttggtttaatctgtgctacttcagtagcgcgaggattaccagttaacacaactttcttggtaggaaattgacttgcagccgcctcaaacgaaatagcaatttttttaacgaacttactcaaaaacttgttggtaacgccaaccacactattttgttcgtgaatcacagtaggtacacccatcatactagctgcaaatacaaccgcaccactaacgtagcctcccgttcccaagactacatctggtttaaattccttaaccatcttacgcgctttaaccacgctacttaagaaaagtccgattgtcttaaaattttcaagtgaaagtgaacgtttgaatccttggatatttatggttttaaaatcaattccactgtctgggacaattttactttctaatcccttacttgtaccaacgtacaaaatctgtgaatcaggttcactttgtttaacttgtttaatcagtgctagggctggataaatatgtccaccagttccaccaccagaaaccatcagtctcatttaattattcccctttatgtaaattttgaactgctgcaataaattcgtcaccacgttcttcaaatgttttgtattgatcccaactagccgctgccggtgaaagtaagataatatccccttctttactatcttgatacgctatttcaaccgattcacttactctagaactatctttaattactgaaataccggctttttgagctatttttttgaatttctcagcagtttcgccattaacaataacttcttttacatttggctctaagtctggaattaaacgatctaaatcgtcatgtcggtctaatccacctgcaattaatatcactggttttttaaaagaacgtaaggctacttgggtagcttcgatatcagttgctttagaatcattatagaattgacgcccattgaggttttcaacatattgaattcgatgttttactccaccaaaagttgtcaaaacttgtttaatatgagctgtgctgactttttcgattttagctactgcgatagcggctagtgcattttcgacattttgttcaccaggaattccaatttcatcggcttccataattaattcatctttaaaataaagtttgccttcaatttcgtacgcaccgctcttagtcagtccttgacgtgaaaacggaactactttcgcctgagttcttttagctaattcttgccattcagtattatcccaattgattaccaagaaatcgtccttggtctgattcttagtaatattcatcttgtcattaacgtaattttcacgtgttttatgccagtctaagtgactagcaaaaatgttattcaaaactgcaatatgtggatgaagtcgatcaataccagctaacataaagctagataattccatcactattttatcttctgcagtggccttttgagcaactgttgtagcaggaactccaatatttccggcaacataagcatgttttttattatcgtcaagcatcaattgaattagcgttgttacggttgttttcccattacttcctgtaaccccgatcaactcactatccattacccagtatgctaattcaggttcagaaacaatttttatacctctggcttgtgcgtcgactagaacgggatttgtataaggaatgcccggatttttaacaatcaactcaattttattttgacttaaaatattggctggatgttcccctagtaccatccggatacctttgttctcaagcttttcaattaattcttgtggctgattagcgttagcatcattaactaaaacatttgctcttaatctatgtaataaaagagcggcgcttactccgctcttggccattcctaaaactagaacatttttatcttccaaatcttctactgacttcatcattaaagactccctataaaatactaattaacgtaattatggatccgattaaaccaactatccaaaatacaatatctactttccattcgttccaacctaacatttcaaaatgatgatgaatcggactcattttaaaaatacgatgtccagttaatttaaaagaaagtacttggagaataacacttaaagtttctagtacaaaaacaatcccgattaaaatcaatgataattcctgatttaaaagaattgagacagctgccaaagctccccctaaggcaagagatcccatatcacccataaaaattttagctggtttatggttaaaaactaagaatcctagcattgagcccactactgccatacagaaaaccattactggaatattttgttggtgagctgcaataattgcatacgttccaaaagcaatcgtcgataatcctgctactaatccatctaatccatctgaaagatttacggcattggaaaatccagttaaccagaaaataacaaacaatgcataccagccgcctaggtgccaaatacctaagccagggatatttaattgtaatgccactccagtctccttaatcactagaaagaaaattagtcctccaataatttgtcctaaaagcttttgccaagctttaaaaccttcattttggcgctttaacaacttaatactatcatcccagcaaccaatcaatccaaattcaactaaaacaaaaagtaacattaaaaggctcacttttgccccgtggaaaatcacaccagttactaaactagcaataatgatagcaatgataaacaccattccacccatggttggtgttccagattttttttgatgccatttaggtccctcttcacgaatcatctgtccttcattccggactctaaagtaattgataaattggggcatccccactaatgttactagcgcacctagtattaaagctgttccattaatcatttttctctcctaatctctacttcttaagacttacagtcatggtcatgccagattttattggaccacccttggccaccgattgcccagaaacaaaaccattcccgctatatttcacatcaatatcaaacatgttagctaattttataacatcattttttgaccaccctgtaagatcaggcatagttatggttccaccagtgtctaagataattcgttgccccactagaatactacttcctgcactctcggattgttctttaacagtttgcccatttcctaatgtaacaactgccacattcttcttacccaattcttttttggcttcagaagcatccttgccaactaaattaggtacttcaattgagctgtcgagatttgacttatcagtttccttatcctgttcaagggcttgtttcatcactggaccaaatatttcatcaagtaattgtgtggcagttttatctttgagcactggctttttcatcgtaatgtacattatgtacttaggatttttggccggggccatcccagcgactgaatacagataactgtcatcgcccattgaatatcctccgcttgcattcgcaacttgggcagtacctgttttagctgcaattttataacctttaattttgaagtttgagccgataccatatggtttatagactacatcctccattagttttcgaacctttttagcagtactagccttaattggccgtcctacatcttttgtcttcattttataagttgttttaccagtattcggatcaactacctttttgataaattgaggcttaaccatttttccattattagcaactgctgtaaaaccttgtaacatctggattgcggtcacattgattgcttgaccgaaagctgtattagcttgttcaatcggatagtcgaattgaatactacctttagattcgctttccaaaccagaattagtggattgcaacagtttaaaacgattaatgtatttcttccatgtcttagctcccatattttgttctaagtgagccatagcgacgttacttgataaggcaaatccttttgcgtaactaattacgccccacccttctgtcttccaatctggaacaactttaccatcgatggtataggttcctgaacgataagtggcatccgagtcaaaattaccactatcaatggccgcagaagtagtaaagattttcatggttgaacctggttcaaaagtatcctgaactagtgcgttattccatgctttagaaagtccttttttagttgaagcattaaaggttggtcgttgtgttgtggctaaaattactcccgttttggcattcataattgttgcgctaattgcctgtgattccgattctgattgaaccttacttaccacattttccatgatgttttgtaaacgctggtcaatagtagtatagattgtgcttccgtcgcgtgctggacgctcagtctgggatcctgggagctggtagccaaacttatctttttgcaacgattgttcaccatcagtccccgttaaagttttgttactcattttttcaattcccataacgccagaaagttgagtcgcatcattttctttttgttgagattgttgagcaaacccaatcaaatttgaagcaaaagttccattgggatataaccgagcttcagatgaaacaaagttaattccgtttaatttttctttttctattttttctttagtcgccacagaaatattgcttcccgcatttccaaattcaacttggaacgttttactattgctgggactaagagtttttaaagccttgtgatagctaattggtagatatttgctaagtactttagccgtctttttcttattggtgacatagagcggcttgttatttgctcctacctgcttcttacttacaactgcgtaaactgaatatgtacttgtgtcttcggcaatcggattgccattcgtatctaaaatagatcctcttttggctttaattgttttattatcggtatacaaacgctttgcttgactacttaagttaacactttcgacagtgccacttacggcaatataagaaaagcgcccaacaataactataaatactccaatcacaatcaataatagccatttaccaaacattttccgattgtgttgagtttccgtagtaccagttgttcgcttttttcggttcatcatttatttacattccttatattctcagagttgagagaaaggcctgcctttttagcaattttgttcaaccgactttggtcagacaattgattaatttcctgttccataatcgtatttttacttgataaggccgtcgctttctcttgagttgtttcaagattatgttgtgcagtagataatcctattttaccagaaacaactgttagcattaaccccactagaataaaaccacaaattgttatcaaaatcttttcaaattttgaaagtggtaattgcctagcagttacaacctcacgtgctctttttaattctttttcactaatgcccgtaattactgtgtcgttaattaattttgttctacggccagcataattattttgagccattggcgtctatcccttctataacttttcgataattctcagttttgcgctatgtgatcttctgttttcttcaagttcatcttcagaaggaataatcggcttcctattgatcaacttgtattttggtttcatatcatctgggataattggcagtccagccggtaaatcaccaatctcagtttgttctttaaacattctctttactaaccgatcttctaatgattggaaagtaataaccgaaatacgtcctgctggattcaaaatttgtagggcttgttccaatgattcttctaaagcacccaattcatcattaaccgcaattcgaatggcctggaaaatctttttagcaggatgtccacccgttcgccttgctgccgccgggattgcgcctttaattaaatcggctagttcaccagtagtttcaatgggcttttcttcgcgagtactttcaatttttcgagcaacttgcttagaatatttttcttctccgtatctaaagaaaattcgtactaaatcgttatagctccattcattaacaacttctctagcattcaatttttgagtttgatccatacgcatgtctaaaggagcatcaaatcgataactaaatcctcgttctgcgtcgtcaaactggggtgatgaaacgcctaaatcgtataaaacgccatcaactccatcaatccccaagtggtttaattcattctttaaattacgaaaatttgattttacaaaagtaacttgtcccttagcaacatattctgctaaatttttttgattgtaatcaattgccgtttgatcttggtcaaatgaatagaggtgaccattttctcccaacttagacaaaattagtctactatgtccaccgccacctagggtgcagtctacataaatgccatcttcttttacatctaagccgttaacggtctcttctaagagaaccgttgtatgtttaaattccgtcatatttatcacaatccaaagtcaattaaattttcggcgatatcgtcgaagttttcttcagtttcttcaatagtttcttcccagcgggctttattccatatctcaactcgattagaaacccccaccaggacacattctttttgtaattccgcatgtaatctcagttttttaggaataataattcttccttgcttatcaaaatcacattggacagcatctgcaaacataaaacgtacaaatgcacgattattcttcttattagaaggtagttgactgagcttctcctcaactagacgccattcagacaaaggatagacaaataagcatccatccagccctctcgtaacaacaaagttgctatccagttgatctcgaaatttagatggaatgattagacgtccttttgaatcaagtgaatgctcaaattcacccatgaacatgaaaccgcctccgtcaactaaatctataacaatattaccacttccccccactttccaccacttaaaacccgaatgtttttcttttatttgaaaaaaattaacatacttagaaaaagtatgaatttatcaatagttcttagccataaaagtaatcatttcgaggtggggattttttctaatttgccttaaaaatacacttattgtaaaattatcctaagtcaatcaagaaagtagtgttttgaatgtataataaaaagaaaaagaaaagcggtttacaaaaaaccatcatgatttttgtttggattatgattatcttgaccttgggaagtgtgctttacgctcctctggctcaattgtttggtgcaaattaatcagaatataaaaaaaagatttaagacagattgtcttaaatcttttttattctttttcacgatatactttacgaggtttactaccttcttgaggaccgatgataccattatcttcaagttgatccataatacgggcagcgcgattatatcccactcggaacttcctttgaagcattgaagtacttgccctttgcatatctgttactaattgaacagcttccgcataatactcatctaattccccactatcattttcttcaatttcttggtcactaatatctaaagtttcatcatagtcagcagattgttgtttcttaacaaaatcaataatctccttaacatcatgatccgaaataaatgccccttgtacacgttcaggcttgttctgacccatcggaaagaacaacatatctcctcttcctaataacttctctgctccattagcatcaatgattgttctcgaatcgattcccgacgctaccgcaaaggcaattctggatggcacattagctttaatcaaaccggtaaccacgttaacggacggacgttgtgtcgcaataatcatatgtattcctgcagcacgtgcaagctgtgccagcctaataattgcatcttcaacttcattagaagctaccatcattaaatcagaaagttcatcaactacaaccacaatatatggcatttttggacgattcatcccgtctgctgcattctgttcttcgatgaaatcattgtagcttttaatatttcgttgatttaattcagcaaacaaatcatatcgatgttgcatctctgcgaccaccttatgcagcgctttagcagcttttctagcatcggtcaccactggggttagtagatgcggaatgtcattatagattccaagttctaccttcttaggatcaattagaattaatttaacctcatctggacgagcattcattaagattccggtaataatgacattaatcatcactgattttccagaacctgtagctcccgcaattagtaaatgctgcattttaactaagttagcttctaccagattacccgaaacatcccgaccaacaggaactttaagtgggtcttctggatgggccggttgagattcaataatgtctctaaatgaaactgtcgaaattgttcgattaggaacctcaattccaattaatgactttcccggaattggagcttcaatacgaatatcttttgcggctagagctaacgctaagtcatcggccaagccaacaattttactaactttaacaccaatcgctggatgaatttcgtattccgtcacagaaggccccatcttcacgctttcaacggaagcatcaactccaaaactatttaaagtatcttgtaaaattttagtattctttttaattgaagaatattcggaactctggtctgtttgtggaatttcagttaatagttccgatgatggtaagcgataattaggattagtcttagactcactatcaaatccactattaatttctaaatcattattgttaacctgattcttaggtttacgttgaactttattagtagtcgcaatttcaatttttggttcaattggatgttcggttcctctagttccatcaacgataggttcttccaaaactttttcatccattttggtaacttcaactactggtttagatgccctgtgcattgatcgagtaacacccgttttacttgattcatttctggtttttgattgttctttttctgaaaaatctaaattgctgaaccagtcgtatacattgtttgcagcagatttaaaactagcgatcgcatgtcgtatggtccaagcaaatccaattccaattttttccaaaacctgatcaaatgggataccaaacagaactaccagccccatccccattagaataactgaaaagagcatgctccctacgctgctaagcaaaaaatgagttgcggtatataaagttgctccaccaattcctcctccaacatcatttgtagaggtttgttctagaaaggatcgttcaatgccatcaatggcccgactgataaacccattttctaatcttaagctactggcaaattgatactctacccacaataaatatcctaacaaagtcaagctaagtccaattactcgatctgttattccattaaaagacaattcttttcccatgaataaaagatacaatccatagatgaatagaataatgaataaaattgggctaagactaccaacaaagattctaaacatgttagcaactaaaattcctagaaatcctcgaccaaaataccctaatattgcaattaaaacgtaagttaaacctaaaagattttttgttggtacttgggtcttttgcttagttttacgtcttgtctttgtttttcgtttttttcttgtttttgccatatcaaatcctattttaatttatcattttcatacaaatggctcatctctaaattagggaatccttgttgacgtaacacttcataaattacaatcgccgctgaattcgacaaatttagtgcccgaatgttttcatcattttgtggaatccgtattgcacattcttcatattgccgcataaatgcttcgggtagccctgtagtttctttcccaaacaataaataattatcttcatcattattttcgctggtataatctgtttgtgagtatgcacgtttagcaaattttgaaacaacaaataatctttttttatcaggaaccgttgctaaaaattcgggtaaattttcatgatatacaatttcaactttgtcccaataatccagtcctgcacgctttaccgtcttatcattgatggtaaatcccaaaggtttaattaagtgcaaaactgtatttgtacccgcacaagtacgagcaatattaccagtattagccggcattagtggttcaaataatacaatgtgatttgtcataatttttctccaaatattttttagaattaaaaacgcagatactcggtattacgcggcgagtatctacgttcgtgaagtcaatctgcccgtttcaaacgaacatagtcgatattgcgatcaaacgatttcaactgcatattaacattactttttggtttccgcaaactccgctttaattcagtcatatccaccgatatttttcttaaatgctctaaatccatgaatgaatagaacttttagaaccgcgtaagctggaatcccaaatatcacgccaaccaaaccaaaaatctgtccagaggctagcaatacaaccaaaatagtaaccggatgaatatccaaattactacctaaaacaagcggtgaaacaaaacggccttcaattgtttgttcaattacgaagactatcaaaaccttgaccagcatgatgggcgaaacaaaagccccaattacaattgagggtaccatcgctaagaatgatcctaaatatggaattaaattgagaaaacctgcagctactcctaaggttagggcaaatttaagaccaataattgaatacccaataaagaaaattactgccacaaaaaatgccacaatcaattgtcctcggatgtactgacttaactgtgtattgatttctgttaaaatttgaatgaatccatcccggcgtttaacaggaaaaacttgtgcgataaaatgaggtaaccgatgtccatcctttaataaatagaaaagaataaacggcattgtaataatgccaataactattttggtaatcaaaccaatcacactacctaacgatgtgaccgtgttatccgcaaattcggttgccttcttactccatgattgaacagtattactaccaataccgtcaatttgtttttttaaatctcctaggcgcggatcttttaaaaatccttcgaccttctcaactcctgaattccagtagtccggccaatttttaatcaatgccgcggattgctcccgaataaccggaatgacagacacaattcctgcaataattaaaatcgtgattaagacaaagatgatcgtaattgataaaactcgtttcaatttgaatcgctgttctaatttatcaactagtggattaatcagataatataagacccccgctaaaataataggaaaacccacaattccgaaaaattcctttagtggactaaaaatccatgtgacttttgaaatcatgtataaaatcatcaaaaataataaaatgatgattaaacttaccactggcctattatctaatacaagcttattaaaccagcttctccaatacttatttcttggtttattatccactgttgttcaccgcctacatatatataatctcttctccaactttaaattctggaaattggttaggtgttaaatagattgcactttccaacggtttttcaggtaccggtttaaattccagcgttgtatgcccaatcatttgtaagttattattcactaaactaccaacaaaattaatttgatattcagttttacctatcttaattttgccaccttttttcaaagcaaatttttgatgcttttgatcatcaatcgcttgaataatcgcaatgttttttaaatccggtgttgcagtttcgtcgaataaaatggctaaagcatctttttttgaaatcgcatccggtccgacactcataatttttgctgaaatcatcaagacaaacaccctttctatattcttatttcattgtatcatatcgcatagtattatccctttagtaagcgcattcaatactaactaaatgtggtatacttgttgttaatgtttaaaagagcaaggaggactattttatgattgaatccattttattaggaacgtatacaaaacaaactagtaagggtgtttatcaaattgatttagatactgattcaaaacagttaactaatttacagttagttaccgaagttgaaaaccccacttatttagcacttagcaagaaaaatattttatatgctgttgaccgttttgataaccaaggtggcttatctgttacagatttatattcaccccaaaacgttcttcaacatatcgtaactcctggtactcctccggcttatgtcacagttgatgaaaaacatcaattcgtctttgatgcaaactatcacgaaggtactcttcatgcctatagtattaataatgatcacacactaaccctagatagtacttttactaatacgggtaaaggccctctaaaagagcaagacggttcacatttgcatcacgttgaccgcactcctgacggtaaattgattgcttgtgatttagggactgaccaagttttcgttttagattatgattcaactggttttaaaattattggcactttcaaaaccactcctggatttggcccacgccatatagttttcaataatactggtgatacagcctacctagttggtgaattatccagctcggtagcagtacttaattataaggattgccagctaacccatctccaaactattaagaccattccggatgattggaaccaacataatggttgtgcggcaattcgcattactgatgatagtcgcttcttatacgtttcaaatcgcggttatgattccattgctgtttttgaaatccaagctgatggtcaattgaaactcatccaaaatatcagtgttgaaggaagttttcctcgtgactttgctttaagtcgtgaacaaaactttttagtagtcggaaaccaaactactaataatttatctttatttgaaagaaattctaatgatggtaaactggaattgattcaaaaagacgttgcagctcctgaagttgtatgtgttcactttaaataaaaagaacggagagaattatgtttaaagaaattccagtagaaaattttactgatattccagctttaattgctaaaggtgccaatcgaattgaactttgcgataatctcgccgttggtggtaccaccgttagtaaaggtgtaatggccgaaacacaaaagtatgctagtgagcatgggatacctgtcatggcaatgattcgcccgcgtggtggtaatttcgtgtacaacgacatcgaacttaagattatggaagcagatctttttcaagcccaagagttaggagttgacggcgttgtctttggtgctcttacgtctgatggaagcttagatgaagaagcaatggaacaattgatcggtgctgcaagtggaatgcaaatcactttccatatggctttcgatgcaattcctaccgcaaaacagactgagagtattgattggctagtggaacatggagtggatcgcattcttacgcatggcggttctttaaatcaacctattgaaaaaggtttagaacaaattaaatctaatcttaagtatgctgctaatcgcattattataatgcccggtggtggcataacctcacagaatgctgaaagtattcaaaatgagttaggggttcatgaactccatggttcaaaattaatctaaaacaaaaagacatgcaatcactgttacgtgatccatgtctttttgttttagtaaaagtttgctaaacatattgtagcaatattaaagtaaatcaaaattgaagttatatcacttaaagttgagatgaacggaccactggctacaaccggatccattcctaacttttccataataatcggtattaaagttccgacaaggttagcaacaaagattgccccactcatcgccgccccaacgataattcctaaaaccatgtttttttgccagaataaaatcaccgcaaaaatagcaattcctgttaatagaccaattaaaataccggtaataacttcattcaaaattagtttaaaaacactatcgccttcttcatcattagctagtcggcggattgctacagctaaactttgtgtaccggcgtttcctgcagtacctgtaattaaagtgataaatactgccaacacgccaaatttatcgagtacattttgaaattggctaataaccattgcactaattaatcctaaaaacagcatagttactaaccaaggaattcggcttttgacagctttccaaggattttctgacatatcttcagaattaaccccagctaaacgtgaataatcctgtgccgactcttcgtcaataacatcgataatatcatcaaccgtgataattcctaacattttattacgttcatcaacaactggaattgcaataaagttataatcacgaatttgggcagcaatttcagtttgatcctcatcatctcttacagataccacgttcgtattcataattcgtttgataaatacatcatccggattaacaattaaatccttaactgaaatcactccaattaattgattagattcgttaaccacataaatgtatgaaatagtttccgcatattgagcttcctgtttaacttgattcatagccgagcccaccgttgtatctacggcaactgaaatgaattcagttgtcatcaacgcaccagcagttttttcttcatacttaagtaattggcggactcgggcagcatctacgggttgcatatatgatagaagtttatgtaacttgtcatttcgaacagctcctaaaatatccgcttcgttatcatcatacattccgtttaacaacgctgcagcataactaggtgccatttcgtccagatattctgcaattaaatctggttcatcatcaagttcatcaaatgtatccgccagctcatccgggtctagatacttgtacacgagaagacgttcttcacgcgttaattcaccaaaaaaacgaccttgatcataattatgtaaatcaaggaaatcttctttaaattttttggaatgatgttttaataattctatttttaatttttcaaaaatagcttgagtattatccatgctcttcgtccttctctttattccaatattcaagcatatcatctggaatagacgttttgatatcgatcattttttccgtaaaaacatttttaaaagttagagagaaacaatgtaaggcttgtcgttgtaagatatcgttagccatcccaccgtataattcatctccgactaatggatgtccaattgaactaaaatgaactcgaatttggtgagtacgaccagaatgtagttttactttcagcaaagtaaaatttttaaaggtatcctccacccaatattcggtcaaagacggctttccttcgcccattggagctaccatccttttaataaatgaatctgggtcacgttgaatcggtatttcaatgatgccatgttggttagtaaatgttccctctacaatcgtcaaatacatcttgttaattttacgttgacgtaaatcttgatccatcactgtatgagcaaatcgatgcttagcgaaaattactaatcctgatgtatcctgatctaaccgagttaccacatggacaactcggctttcataattatttttaacataatagtttttaacccggttaactaatgtatccttttgattagctgcagattgtacggttggtaagaagggtggcttatttacaatcaaataatctgcatcttcatatcgaacatcaattggtacatcagatagccctacatgtggattactaggttcaggtggcaaagtcacttcaactaaatcgcctttttcaaccattgcatttgttctcgtaggtaatccattcacaaaaatcttaccgccattaaacttaatactttttaataatgaccttgaaattcttttcctacccaagaaagtccgtaagtgctgccgactctcaaagttaactatccatctaaacttcatcgatactaccaatgaaggaatttcgaactcgattccaaaatccagtatgacgatactttaagaatttcactttttgttcatcaatgctatagtgaacctctttgacatgtttatccagtaaatcgatacgatctgctgtaaaattgtaggttcgatggaaactaggtactggcctaattgtaatagtttcgttgggcgccataattaaagaagctcccaccgttcgaaaaacgcgattattaattgacgcaatttcagccatttgtaatacttctaatctaggatgtacaatcgctccacctaccgaacgattgtatgccgttgatcctgttggtgtagaaatacacagaccgtccccacggaaacgttcaaatagattatcaccaatcaatacatccgctaccattgtcccagacaatttacgtaatgtggactcgttaactgccttataactaatgtgtgaaccatctgtatgagtcacatcaatatttaataatggatacgaaacttcagctcctccatcactcttcaaagccttaactaaggtttccaattcatattcgcgccagtctgtgtaaaaacctagatgtcccgtatgtacacctacaaatcggacctcttcaagaagattaagatatttttgaacggcagatagtaacgtcccatcccccccaatggtaatcaccaccgtaggtttttcgttatcaattacaatctcattttgggataaaatttttgctaaatctttaccaacttgaatggaatgctcatcacttgaatgataaatagctactctcatatttagacatccttttgttctttttgtgctaataaaatttgttttctgatttcagacatttctttgtctaattcatatgatttaaccgaggccttctgcaaacgtgttcttagttcttttggaaattctccgtcaaatttataatttaaagagtgctcgattgtagcccaaaaattcatttcaagtgtacgtacttgaatttctgctaaaattttcttttgaccattcatcatttgaaccggatattccaccacaatatggtaagaacggtaaccactaggtttttcattttcgacatagtctcgctcttcaattaccgtcatatcagtacgcttccgaattaaatcgacaacttcatagatatcttctacgaattgacacataacacggacaccagctatatcctgcatgtcttgttctatgcgttcttctaggacttggcgacgaaccatcttttcttttatactttcaactggttttactcgtccagtcacaaactcaattggactttcttctccattttttagaaactgagttctcatacccctaagcttaacctttaattcagaaacagcctgggaatatggtaataaaaaggtatcccaatctttaatcatgcgtatccctccgaaccaaattaacaacctcttctattctatcatagaaactaaaacttctttttaaacattgttttcagattttttaaaacaaaataattgattttatatttaaatttggtaaagtaaagacagtttgacttatgtaattctttggaggaattaaaatgcttgaaacttatcttttcatcactccctggggtggtgagtgctttaactgcgaaaaagaaactattcgatattttaaatatgctgaggagaaagttgattttaaaattattacagttttaaatatgaacgttgtccttaaattcattaaacgtaatcaacttaaagacgctaattataacgaactttttaaccgaatgtatctaactagccttgattataaagccgctagttatcaaggaaaagccaagggacgtgctttcttaatggcaatgcaaaatgcaatcattgacaacaatgtcccatattcatttgaattaggtagcactattgctagacaagctggtttagatacagccatgtttgaagaagatcgccaatcaaaaatgacgcaagaagactttaaacgggatcaaaaacttgctcatgaaatgggcgccgaagacatcccagcagcggttatctttaatcttaaagatgaagaatgtggagtcttaatggatcactatgactaccaaactcttgcatcggtgtgtcaattaaaaatgattcaaaagactcagcccaagaagttgtttacccctaaaaccctatagtctcctaaaatcaaagcttacttatcctactttgattttttttgccaatttttctgataatgaattataccattgcactttttgagaaataaaataccattcgccatcattactgataacgatgtttttctctaaaagcatttgccaaaattcaatatcaatttgagtaatatcagtgatagatactttaactttttgttctgctaaaaccaaaaagcgcactcgatttagtagtggaatcccacgattcctaaaatcagtgcacagtcgtggaaaatgaaccgtccaaggacatcccattaaatttttaccatttgtatagcacaattgttgtatttccacatatcgttggtcaatttgatttcctagtaaggaatgttcaatcttgtaagcctcatattcaacggtaggtaatttgggtcttataaattcattttgatgacctttgcaattaaaaattctttcttgataaagaactttgcctaaaactgctcgttgcatattaaaaaatgcatggggagcttcttgtttaagagcgtcccaagctaagatccaccatccttcttttttagaaaaacggccaaatttctgtacggtttgaaaaagacttccttttccaagatgtttagggcccgcaatccaataagagattaaccctaatttcaaatacgctttagtccttttttgaatttcctttaacttaattggactacattgatattcaactaagtatatgtggtcatcgatttcaactctcaaatccgctctttgcttaatttctggtagataaaattccgtctgtacagaaatttgacgttgattgaagaaatcgatgaccttttttttacccattaaatgacgtttagtttcaccttttggctgatagccttgtttcttagtaaaggattgatgggcaaaatagttctttttgtattgcccactacatagttttaacgctcgttggcaacttggacaaaagtacttttcattccgatcagcctttcttgcttccactaaagttccgtttttagttattccaattttcattaggttcaccccaatatagaaatacggcttttgggatctttcccacgaaaaaaacacaacaaattaatgttgtgttttggtaaaatctatttttgattatttaaaataacgcttagccagctctaaagctgctccatccataactacttcaccatgttctctaagaacctcgcttgaaacaatagtcgaatttccatattcatacgcgattgctaagtcattcttaatagtttcaggggaattttcactggtaaagaaagttaattctaaataatatatgtcatgataacggtacagaactgactcaattccactattggtttttatcaattctgcaatacttggtaagctttcaaaatcctctaactctatcactgatttttgcgtacttccaactccattagcatagccatttaggtcagctggatttccgtcactcgtatagcttgaatcatcgttatttttatcatttgaatctgtttcggccaattttctctttaaaaagtccgacacttcatccatctccccattactaggagcattgtcttttgatactgattttatagcttcttccatgccatcagttgggttcttactaatgtatagttctaacccattacggttaggtagcacttggaaagtaacagcatcattactagcaaactgatgatctgtatctacctcttctaataccgaataaaagaagctctcgatttctttatgattatcaagtaaatctaggaacgtcacacctcgctcatttaaatcatccgaactaattgttactcggattgtatcatcgttaattcgttccatttccattaatcagcacctccagttctatcgaaactgaatggaaataacagtatatttgttttctataattatcccacaaaatataagacaataccacctgtccgtttcaggtcacccaaaataaaaagaatcatttcgagttactgtggagccttgtaaacccaaagtgattctttttctattttaaaggttcgcgatactttgtgcttttgccaattccagttgacgtacttttcgtggtaagaaacgacgaatttcatcttcgttataaccaacttgaagtcgtttgtcatccatgataattggacgtcgaagcaatccaggattttcttcaattaaattaataagttgttggagtggtaaatcgtccaaatcaacatttaactcttggaaaactttagagcggcgagaaataatttcttccgtgccattctcagtcatccgaagaactcttttaatttcttcggcacttaagggttcagaaaagatatttctttctgtaaaatcaattctgtgttctttcaaccacgcttttgcttttcgacacgaagtacaacttggtgatgtgtataaaataaccatattaaattccccctttggtgacctgtaacattacttaacctgtaattaaaattgtacaatgttatttagcttttgtccacccctccgttaaccttttttcttacaaaaaataaatataacaaaggcatggtttttagaataagaccgtttatttcacactaaatttacacattaaataattatgttaaataattttaaaaagagaatttaataaaaacttatagaatacaaaaatcataagttatgaaactgttttctaaatttcgatggtaagcccaactttaggcgcaaaaatgttgtttttattttttgaaaattgttttgtttcttttaacatttcgtcaatatcaatctggggagataagtggctgatcattaattgctttgcattagacttattaaataactctgccgtctcttttgtacttagatgccattttatcccagtatgattactcaaaaaattggtatctgttactaataaatcactattagttgcaaatttaactaattcgtcaaaatatcttgtatcagacgtaaatgtgaaaatttttccagtttctcgttctacaattcgcgttgcaaacgctggaactgggtgaatcgtctttttgaaactaactgtaaaaggacctaaatcaatttcttcattctcattataacctacgccttgagaagcgtttggccaagttaaagctccaaaatttagtgggtcttctgtatgcccatatattggcaaaatttcaaccttattcttagaatttagttgccattgatactgtaatacccctaagtcagcggtatgatcgtgatgataatgtgttaaaagtactgcatctaaatcaagtggattcaaatgcctttgtaattccaataaagttcctgaaccggcatctaacaataaattataattgccactttgcactaagtaccctgtcgttcccacattttcgctaggatatccaccataatatcctaaaactgttattttcatatttaattcctcccaattactttatgtatctattttaacgcaaagttataatggttttcgattcgttttaaaacaactataatagaatatggatggaggtgcttatgtaatgaaaaatttaaatgtatctttcggtagtgaacccgttttaagagaaatcaaagaaaaatatgcttctcgtaagatgactttattatcaaactctgctaaagaaactagctttcaattagttgatttttccgaccagaaaaatgttttttactcacctaatcgttatagagttctttttgaaagtccattcttaaatatgggtgatatttttatttatgatttttttgatttagcaggtgattctctctcagcttttgatgaaaaggtgcgtcattggagtggcattaatgctgactctagttttttgcaaagtgtacttttactatctcctctagatggaaaaccacataatcgtactgttctaaccatctggagtacgaataagtccgatcaagtcactttagatacacacgatctgaaaaaaactttggagccttacgtgaaccacaactattttagaactacttataaagtactgttgtaatactatgaaattatagttattatactgtatactgttataacgtatatagaaaggaatggttcaaattttcttaaagaagaacaataaggctttaatttcaaatattttttttgactttattgttgggattttctttgtttattatctaaaggtctcagctgacgtttctacattcttacgtactattttaattgtctttgctgcttatgactttacagacatgttttttagtatcaaattattaatagaacaaaaaagaaattctaaaaaataaactttcataagtaaaaaagcacctattaatgcaacagtgcttcccaattagtcagatatttgatctaacttttagggagtactgaacgttaataggtgcttttctttccagaaagactctattgcattcctaacacagttaaattaaagtacaaaaaaagagttagttaaaactaacccattatcattaaaggcggtaaccggatttgaaccggtgatgaaggttttgcagacctctgccttaccacttggctataccgccattataataaaaaagtgtaattactcgcataaaaattacacgaaaattacacgaaatagctcgataacaatcttactaaatttatgccgccggtgggggtcgaacccacactcccgtgaaggaactggattttgagtccagcgcgtctgccaattccgccacagcggcatctagcgttgctatattataaagtaggtctttaaatcaacctaaagggcggtatgtgggaatcgaacccacgcgtgccggagccacaatccggtgcgttaaccacttcgccaataccgccatcatggcagggatagtaggagttgaacccacactgacggttttggagaccgtagttctaccattaaactatatccctatcattggtaaaaacaaaactaaatgtgaactaaacgttcactatggcgcgggacagaatcgaactgccgacacatggagcttcaatccattgctctaccgactgagctaccgagccaaaaaatatataaatgtaacaacggtcctaacgagactcgaactcgtgatctcctgcgtgacaggcaggcgtcctaaccagctagaccataggaccaaagaaaaaattttggaatggaggatacagggctcgaacctgtgacctcctgcttgtaaggcagatgctctcccaactgagctaatcctccaaaataatgacccgtacgggattcgaacccatgttactgccgtgaaagggcagtgtcttaaccacttgaccaacgggtcatacttttatcatatatacggagagtaagggattcgaacccttgaaacaggctttaacccgtttacatcatttccaatgatgctccttcggccatctcggacaactctccaaataaatgatttaaaggaagctgatcttttttgtccgaacagcgttcggattaattttacaatctaccgagatacaattaatttaatgcaacatcatacatccgtgcgtaactttatgccggaaccacttcctgaaagtgtaaaaaatcaattagttttggccactcaaagtggttcatcttcgaactttattcaagcaacttctattattgaggtgactgatcttaaaactcgtgaaaaaatcgccaaaatttccaatagtgatgcatatgtaaaacaaagcggggccttttttgtttttatagcagatttgtatcgacaagctaatatcctaaaacaagcccaattaccattagatgggattcaaaatatggaatcgcttctagtaggagttgttgatacggccattgcaggtgagaacatggcaattgctgctgagtccctagacttaggaatctgttttattggtggaatccgaaacgaaatggatagcattaaggaactacttggtttacctaaatatacagtgccactttttggaatgactgtggggattccagttcaaaaaaatgaaattaagccacgtctacccaaaaagaatatttcttttaaaaaccgatatgaaccatcggttgcagtaaatctggatagttataatcgacaaactcgtgagtattatgctaatcgttcaactacccctcaaaatacggattggtctcataaaatgcttcatttttttgccgaacccaaaagaccagcagttgctgaatttcttaaaaaacaaggattttcactggaataaaaaatgcattactagttttaaaactagtagtgcatttttattaaacaatcttttttctagtaggtaaggcttgtagaaatgccgtagttaaaattaataacccgccgattgtttcagctaacccaaaatgaactcccaataaaaggattgaaagtaatgtggcagttaaaggctcaaaagagctaagcatcccagtcgtatcgggcttcaaataatttaaactacttaaatagaataggtaagataacatagtaccaccaacaataatgtatacaatcaataagatagaagcaggatcaatggagtcagggcgattagttatgattatcttagcaaatggaatgcttccaatcagcatggcccaaccagtaactaaagctgcgtcaaaattcttaagtaagcgacgaggaatcaaagtatagttagcttgtccgacccccgccattagtccccagaatactgctaaaggtgctaaagctagactaccaaggttacctttagtaactagtagtaaagttcctattagggccacaagaatggaaataacatcaattcgtcgtggcaaagttcgacttccaactgccaaagcaagaatgatgaataaagggcccataaattgaaggattgtcgcagtagctgcatttccaaatttgatagctagaaaataagttaattgggatggaaccataccaagtagggcaaagagtatcaaccataaaatattacttttagtataaaaaatggtaaaaatcttcctaccattttttaaaaaactataaacgattaacagactaccagccgtaagtagtcgaactccgaccaaccaaatggggtcaattgactgatgatgaaaaacaaattgagtagctgttccggagccaccccagagcacgctacctaagattgcaaataacaaaccttttgttttattttgattcataagaacacctatccgtatactcaaattcaataatatctatcatacgtggattttccattaaaacaaagcctttttataaaagaatcaactccaattagaaaatatttaagatatttacttttaaactaataagagaaggatggatgaatttagaatggtgttaatctgtaaaaataataataggatgaaaaacgattcttgaaacgctttaaaagttattaaaacgctttaaaagttattaaaacgccgataatagacattcgaaagcaacctaattattttacttttgcctaggaatgggatagaatgaataatcatacatacggaagttaaaagaaaaactagtcgaggtgatcaacaattctaaagaaaacaaaacaatttttgagaagcaataatctacaatatagtaagaaatatatccggccgatgatgacgccaggaagtgtttatgtttttaaatttggcaaagacgaacttaataatcgagcaattattaattacacccatacatggacgggtcgaattaaaattactgagattgatttacgtctgcatgaacaaaagcatcctcgtatctttcgtcgagaaagtgatttattagcttatttaaagaaacatctaacggaaactgatggagttactaacataacacgccgtaaaaaacatcattccaaaaaaataaaaaagtagattgactattgacaccattaagttttatgcgtagtatagtcaattaaagaaaagaaaccttaatttggtcctgtgaggccaaaaggctcaatttgttcggtagaacctcgcacttaacggggaatcatagaatttactgaagcctcttggatcacatcgatctaagaggctttttctatgaaaggaagtacgtggttatggcaaagaaagaagaatatcacaatcctgaggcaattttggatatccatgataaagtaaagtttcctcagttggtaggcctatctattcaacatatgtttgcaatgtttggttcgaccgttttagttccaatcttagtgggtttaaacccaggaatcgctctttttagttcaggtgtgggaacgctgttatatatcttgataaccagagctaaaataccagcttatatgggttctagttttacatttattgttccaatgctggcgttaatgaaaacaacgggctatcaaggcattgcacaaggaactatctcagttggggtagtgtatctgattgtggctttgttgattagttggatgggttcggattggttggataagatattaccaccgattgtcgttggtccaattattatggtgattggtttatcattagcaggaaccgctgctacagatgcaactatgcgatccgttggcagtcaaagcgtgtatgatatcaaatacttcattatcgcactggcaacactgttaatcaccattgtatttaatatgtacctcaaaggctttattagtttaattcctattttgttaggtttaattgctggttaccttatcgcgcttgtcatgggagtggtcgatttatctactgttcaacaagctaaatggttagttgctccaaattttgaaattccatttgtaagttatcagatgcacttcaacatcggggccgtattaagtatgatgccactggcattcgtaacgatgacagagcatactggccacatcatggttttgaatactttaacccatcgtaatttctttaaggatccaggactacactgcacactttcaggtgatggtgtggcatcgattgtagctggttttattggaggacctcccgtaactagttatggcgagaatattggagtacttgcagttacaaaagttcacagtgtctatgttttgatgggtgcagcggtgagtgcaattatctttagtttcgttggaaaattaagcgcattgattcaaagtattcctaatccagtaattggtggaattagttttctactatttggaacgattgctgctaatggtctacggattttaattgataataaaatcgactttaatcagaaacgtaatctaatgattgctgcatcaattttagtaatcggtattggtaatgctagttttaatattggtaatctaagtttctcaggattagcagtggcaaccgttttaggagtcattcttaacctagtccttcctaaacaagctttaagtgaaaaataatttacttttcgtatatttaagcaaaatggtatcatagtatctaaacacgagatattataggagctgattttgtttgaaatggactgaagtaaacgtcaaaacaacaaacgaggccgtcgaagctgttagcagcattttcgatggcctcgatgctgttggagtgaaaattgaaaatgcactagattttgagaattatcgagctagtaatcctgcagaattaatggaattaaaagatattccacatattactgaaggtgcaatcgtatcagcatactatccagacgatataacaaatattgacgtaattttaagtcaattacgtactaaggtgaatgcattagttgactttggacttgatattggagaagccagcattacgacggttgaagtgcaggatgacaactgggctacagcatggaagaagtattatcatccagtccgtattacccgttatttaacggtaaaaccaagttggagtgattaccaagcaagtttcagcgatgaaaaggtaattagcttagatccaggaatggcttttggcacgggaactcatcccacaactcgtctttgtctccaaggtttagaaatgacgatgcgtggtggcgagacactttatgatgtcggaactggttcaggagttttaagtattgctgctaaacacttaggagcaagtgatgtagaagcttttgatgtcgatgatattgcagtcgcagccgctcaagaaaacttcgatttaaatccaattgctaaggatattaaagttagtgctaatgatttattgaaaggggttaatcgccctgtagatacaattgttgctaatattttatccgatattttagtaccattgattccgcaagctaagcaattgcttaattccaatggatatttcatattatcagggattattgatgataaactagagttagtgatagatacattgatagccaatgattttaaaattgaagaagttctacattacggtgagtggcgtggcgtgattgctactaatcggaaagatgattaaggagaaactatgcaaaggtattttgtaaaacagccccttaagatccaagctgaacttcaactttcgaaagaagattctcatcatctgattcgagtaatgcgtactgatattggtcaagatgtggaagttgtagatctagatggtaaagttttcattgcggaagttttgaagagtggatcaattgcaactttaagaactaaagaagatattactaagtcagttgaactaccagttgatattacgattgcgtgtggaatttctaagggtgacaaaaacgaacaaattattaaacgcggaactgaaatgggagctaagcattttatattttttgagtcgcgttactcggtagctcgttggtcagaacctaaagtggagaagaaattaaaaagactacgtgaaattgccaaaggtgcggctgagcaatcacatcgccagcttattcctacggtggtatttattaaagcgcctgcactatttgaaacaaccattgagcatcgaatggtagcttatgaagaatcggctaaacaagatgaacatgctaattttaaatcgcttctattgcaactaaaggctggagaccagctgctagtcgtcttcggtcctgaaggtggatttgcagaagaggaaattcaagaatttactgagcatcaatttattttagcaggtttagggccaagaattttaagagcggaaacagctccgatgtatttattatcagctgtatcttatcaattcgagcttaagtaataaggagaaagacaatgaaaaaaattaataaatggggactttctattcattggcgatacatacttttcgctttcttaattggaattgtccttccaataattttaaaactttgccatacgccatcggtaatgattgttttatggctattaattgtatttaatgttttggcaagttacacgtttggaaatctaataaaatcaaatggattacatttcatttttctatttgtttttcctattttatatttaataggggcctttattattttgcctcattattcatattattttaccatcgtatatttatgtgtagaattactgtcgtataacctttctaacggctgaatattgcaatttattatcaataaacgtatacttaattcaataaaagcgaagcacgtagtcatttgattccgtgcttttattgtattttgaggttggtggtgatattaatgtctaaagaaccagtgttaacggcaaatgaagtaattaaaatgtgccaggagtacatgaacgaagaacatgcagcatttgttcaaaaagcctgtgattttgcgtcatatgtccataaggaacaatatcgtcaatcgggcgaaccatatattatgcatccgattcaagttgcagggattttagccaatctaaaaatggatcccgaaacggttgcagctggatttttacatgacactgtcgaagatacactgattaccttaggtgatatcgaagaactttttggtaaagatgtggcagtaattgtcgatggtgtttctaaaatcagtaaaatcaaatataaatcaaatcaagaacagttagctgaaaatcatcggaaactgcttttagctatgtcacaagatatccgagttattattgttaagcttgcagatcgcttgcataacatgcgaactctacaacacttgcgccctgataaacaacgacgaatatcaaatgaaacgttggaaatttacgcaccactagccgaacgcttaggaattagcacaattaaatgggaacttgaagatatttcactgcggtatctaaatcctcaacaatattatcgaattgttcatttaatgaattcaaggcgaaatcaacgtgaagaatacattgattccgcgatttcagaactaaaatcagcggtcgaagatttacaattaaagcatactgaaatttatggaagaccaaaacacatctattccatctaccgtaagatggtcgatcaacacaagcaatttagtcaaatttatgacttactagcaattcgagtgattacggtgtcagttcgtgattgttacgctgtgttgggcgctatccatgctaaatggaaaccaatcccaggtcgttttaaagactatattgcaatgcctaaggctaatatgtaccaatctttgcatacgacggtggtagggccagaagggcgaccattggagatccaaattcgtactcaagcgatgcatcgtgttgccgagtatggggttgctgcccattgggcttataaagaaggcattaaagatgagttggctcaaaatacaacagatgcgaagttaaactggtttaaagaaattgtcgaacttcaggatgaaagtaatgatgcagccgattttatggaaggtgttaaaggggatctgtttggggatcgcgtttatgcatttacgcctaagggggatgtgtatgagttaccaaagggagctggtccactagacctggcttatatcatccatactgaagttggtaatcatgctaccggagctaaagttaatggcaaaatcgttcctttagattacaccattaaaaatggtgatattgttgaaattttaacttccaaaaattctgctgggccgagtcgtgactggattaatctagtttctactcgacgtggacggaataagattaaacaatttttccgccaagttgatcacgaagaaaatgttgaaaaaggacgggacatccttgctaagcaattggaacaaacagggtacgatgtttctgatttgatggacgatgaacatttaaaagatgttgctaaccaaatgaacttctcccaaattaatgatttgtttgctgcagttgggttcggtgatttagctccggcgggaattgctaatcggttaaccaaggatttacgtaagcaagcagaagaagatcgccaacgagaggaacaaaaacaattgttagaaagtcatcaaacaatctctaatgaaagtaatgacgatcgtaagaaaaagaaatcttcttctgaaggcattgtaattgagggcgcggataatttattagttcgcttaagccactgttgtagtccagttcctggggatgaaatcgtgggatatattactaagggacgaggagtttctgttcatcgggtcgaatgtcccaacgtccgtcaagctgaagaaaatggtgaacgcattattgaagttagttgggaaaatcctaatgatgaatcaggaaattactctgctgacttggaagtagaaggctacaaccgtaatggcatgttaaatgatgttttgaaatcagttaataactctactagaaatctttcatcagtgaatggaaaattagatcataatcggatggtagtaatcagtatgactatcggagtgcgaaatttattacatttacaacgagttatggaaagcttaaaaaatgttaaggacgtttatgtggttaaacgtccaacccattaggagtaatgtatgagagttgtaattcagagagtatcaaaagcaagcgttacaattgaagagaatgtagttggaaaggtcgggccgggattcatgctattagtggctttcaacgatgaagatacggacgctgatctcgactttgcagtacgcaaaattgttaatatgcgtatttttgaagacgatcaagctaagatgaatctgtctattaacgatgtcaaaggagcgattctttctgtttctcaatttaccttatttgcttccactaaaaagggaaatcggccgagctttactaaatcgggtaacccagagttggctagtaaactgtatgatcagttcaatgctaagttacgtgctacaggaattgaagtacaaactggtcaatttggggcggatatgcaggtggaattggttaacgaaggaccggttacgattgttttagatacacaaaataaagaatgattgaaagagcttaaattagaagtcttagactattgttggcgtagagcaaacatagtttagctcctaagataagctcttttttaaggagaaaattatggatattttttatgattttgacggaacgttatttgacacatacccagcgatggtagctgctttggtacaaacagccgttgattaccaggttaagattgaccgaaatcaagcctatcagcaaatgcgtcaaggatccttggaggatgcgattaaagttttagctcgtatagctaagattgaaagtactacgattgaacgtcattttcgagcaattgaaaacgaggaattaaaaaatagtcgaccatttgaaggcgtaaaggcaacgctagagtcggtagtaaaccatggtggtaaaaattatttgctaactcatcgaaatcaggcggcaattactttactagaaaaatttgaaatgaaaacttggtttgaagactttgttactggagacatgactttcccaagaaaacccaatccagcttcattaaattatttaattgagcgaaatcaagcaaacaaaaaaacagcatatatgattggcgatcgaaacttagatatcgacgctgcacataatgctgatataaagggaattttatttgatcctgaccaaattattaatgtaactagccatccagaattaataaccaataattttaaagatattcagacttatctagataaaaaattgattaatccttgatgaacagctttggcgaccttttttggataagaagcactagacaattttttgaaatcagagtcggtgttgatgtatccaccctcaattaaaattgccggacgcttgttatcacgtaagacctgataattagcgaatttgacgcctcggttgtaaagaggaacatcattaatcaattgtttattaatggctttacctaattcaatcgaaccgttatcatggtaatagtaggtagtgtctccagttccggcattattttcaccagaagaatcaaaatggatactgataaaggcatccgcatgatttcggttagcaatttggggacgttcagctaattcgataaaactatcattatcacgggtaataattactttagctccactgtgatctaatttactttgaatggccttagatacacgtagggtatatttcttttcttcatgggattgatcgattcctaaagcacctgaatcaaccccaccatgtccggcatcaatgacaataattgattctgctaaaggagtttctttttgacctttaggaaaagaacggttggtaatccaatcgggaatccagcccattttagtgtcatcataacgaatatgataccagtggttagatttggaaagtacgcttaccgtttgatattgattgagggtcccaattttttttgacgttcggctattagaacttcggattgcaacttgatccaaacctacgtatacggttttagaattaaaaagtggtagaatcaaaaaaattgctacagccccaaacgcaattgatagaccaatttgaacaaggtttcttttaataaagttaaaaataatttctttattcatgctaatctctcttaatttattattattagtatccattatagcaaatttttaagggtacttacttgaagaattcgccttgactaatatggttttttctagtacttttataactaaagttaatataaatcgatgaaaaggactattaaatattgacgacatggctaagagagctcggttgctgaaaaagagtgcatgcgtcgtattgaagacaccttggagatttggtcggcacccattatatatgccgtagagtacaaatctaaggtggtaccgcgtcaagacgcccttgttaaatcaagggctttttttattttctttgaaaaatatttgaggtgaatataaatgaagtatcaaaaaccaaagggaacagcagacatattaccgccattttcaaaagaatggcaatttgttgaacagaatgctcgcgaaacatttgcactttataactacgaagaaatccgtacaccaatttttgaaaagtttgaagtcttttcaagaagtgctggggatacatctgatattgttaccaaagaaatgtatgattttgatgataaaggtggacgccacattgcgttacgtccagaaggaacagccggagtggttcgggcgtttgttgagaataagttatatggaccagaacaccagaaaccggtaaaagtttactacatgggaccaatgttccgttatgaacgtccacaatctggccgactacgtgaattccaccaaatcggggtagaagcattcggtagtgatagtcctaaaatggacgttgaaacaatcatgatggggatggattttcttaaaaaattgaaggtttcgggactaaaattagttatcaatacgctaggtgataaagagagtcgtgatcgttaccgccaagcattgattgattacttggaacctcattttgaagaattgagtgatgattctaaagctcgtctccataaaaatcctttacgtgttctagatagcaaagataaaaacgatcaaaagattgttgaaaatgctccagagattttagacttcttaactgaagatgctcaaaagcactttacaagtgttaaagaagaacttgatacattaggagtagactacgttttggattcatccatggttcgtgggttggactattataaccatactatttttgaaattatgattgcagattctcctttaggaaagggggatgttactatctgtgctggaggtcgttataatggtttggttgaagaattaggaggacctgaagtttctggagttggttttggactaggagttgaacgtctgctcttattactaaatgctgaaacacaaaccactcttcaaagtaaacaacttgatttttacgttgttggaattggcgatcttgttcaaaataatgttcttaaggttgtccatgaactccgtcaaatgaattttgtaactgaacaagattatcttgatcgtaaaccgaaagctcaatttaaatcagcggataagctgaacgctaagtatgtggttaccattggcgaatctgaaatgaatgatcgagtctttaaattaaaggacatgcattctggagaagaacgtaccgtagcattaagcgaaattaatacattaaaagatcttttaaaataagcgaggaatactaatgaaaagaacaacatacgctggtttagtaaatgaacagtatactggccaaacagtaactttaaaaggatgggttcaaaaacgtcgtgatttgggacaactaatttttattgaccttcgcgatcgtgaagggatcgttcaattagtatttagttcagaattttcggctgatgcattgaaaattgctgatcaattaagaaatgaatatgtccttgaagtaactgggattgtcaaacaacgtaaggaaaaagacgttaatcctaaaatgaagacgggacaaattgaagtggaagttcaacaagctaagattttgaactcagctaagacacctccatttgatattgaggatggagtaagtgcctctgatgaattgaagatgaaatatcgttatttggatcttcgtcgtccagaaatgcttaaaggtcttaaaatccgtaatcgaattacgcaagctgttcatagttatcttgatgaacaaggtttcttagatattgaaacacctgacttaacaaagtcgacacccgaaggagctcgtgattatttagtaccttctcgggtttacccaggacatttctatgccttacctcaatcaccacagttgtttaaacaacttttaatgggagctggaattgatcgctactaccaattagcacgttgtttccgagatgaagatttacgtggagatcgtcaacctgaatttacgcaaatcgatttagaaactagttttttaactgctgaagaaattcaagatattacggaaggcttaattgctcgcgtaatgaaggatactttggatattgatgttaaattaccatttgatcgaatttcttggaaagaatcgatggaccgcttcggtacagatcaacctgatgttcgttttgggatggaattaaaagatattagttcaattgtggctgactcagaatttaaagttttcagtggggcagttgctaacggcggagtagttaaggcgattgctgttcctgatggagctaacaacttatctagaaaagacattgataaactgggcaaatacgtagaacgctttggtgctaagggattagcttggttgaagattacagatgacggtttcagtggtccagttgctaagttctttaatgcagaaactgaaaaacaaattatggaacaaacaggggctcgagtaggagacttactattgtttgctgcggatcgtgccaaggttgttggtgatacattgggttatctccgtgttgaacttgctaaacgttttgatatgatcgatgaggatcaatttgctttcctttgggtagtagattggccgttatttgattatgatgaaggtgaccaacgctgggttgctgctcatcatccatttacaatgccaaatgaagaagatattcattatctagatgaaggcgaagaccctcatcaagcccatgctcaaagttatgacatcattttaaatggacttgaattaggcggtggttcaattcgtattaacacacgtgaacttcaagaaaagatgctgaaagcacttggcttcagtctagaaagtgccaatgaacaattcggttacttactaacagcgctcgattatggtttcccaccacatggcggtttagcaattggtttagatcgttttgctagattattagctaaacgtgataatattcgtgatgttattgcattccctaagaattctaaggcatcagaaccaatgacagaagctccaacaatggtttcagaagaacaattagctgaattatcattagatgttgatgttcgtaaaccagaagactaataagaaactagaaaaaagaggatggttaaatcctctttttttattggattatatataaaaaattattaaatgagtatcagtcttcatttcaagtgactgaaaatgttatattaaactagagttaaataaactaagaaagtgattgatatatataatggatcatcaaatcaaaaaaattgcaaaacgtcaccaatacgtggctagaatttcaacatcgtttatctatgcgatcttggtttcgatcgcgatgaactttttttggacgccgggccatatttatgcttcaggtatcaccggtgcagctcaggtagtatcaacggttttaaaaagatttttgtcaatggacgtttcagttgccattttacttttcgctctaaatgtaccgttgttcatcttagcttggattgcgattagtccacgttttaccgtttttacggttatttccgttggtttagccagtgtgatgattaagtttttacatccaatgactttgacaacagaccctataatttgtgcaatttttggtggtgcagtcaatggttatgggacaggtttagcactcaaaagtggtatatcgaccggtggtttggacattttaggaattacaattttgcgtaaaacaggacatagtattggaagtattaacattgcctttaacattttgatcgttgtagctgctggctttctatatggctggccatacgctttttattcaacaattggattaattgttaacgctaaagtaatggatatgacatatacacgacagcaacggatgcaagtgatgattattacggaccgtcctaagagtgtgatcgatagtatccaaaataatatgcggcgcggtattacaatcgtccacggggcggaaggagcttataatcataaggataaaaccgtccttttcaccattgtatcgcgttatgaaatgccggaattggaagcggcgatggaggtctctgatccccatgcctttgtaagtatcaccgatacgattaaaatattaggacatttttacgagcctactttgtgaggagtttattttgaaaaaaatatatttattactagttagattagctcgtttggcgtttggcgccaagaaggcacagtaccaagtagcctattttatgagctttgctggtaacgaaacttttattagagagttagtaaaacagtttggttcagacgaagttttaatcgtctataaaacaaacgtcaaagaaaatgttttacagttgcaacaggagcacatcataaaacatgccatcgagtttaaaaagtttcaagttacgagctttgttaaaggcatcaagttggcccgagtgacactttttgacaattattatccagaattaagtgctatcaataaaaccaaaaaagattatttcattcaaatgtggcatgctaacggagctattaaagcttttggttgggaagatccaagtacatatcatcgttcggtggaagatcaacaacgttttcagcgagtttatgatagttttgaccaaattgtagttggttctgaaaaaatggctgatgtttttcagcgaagttggcatgtagcttccgacaaaattgatcgaattggatatccacgaaccgataaatattttgaagaaagttggatagaaaaagcacgaaaaaaaattcaaacaaaacttccagaattaacccaaaaaagagtgattttgtacgcaccaacttatcgcaaagatgtttcatttagccttccagatgactggcgcaaaattaaggtacctcaggatgcagtattgatagtacgtttacatccccacctagctaatgtggaacgtcaaattgttgatgcatctcctgatcgagtgataatggtggaccattttatttcaactcaggagttactctgtgttgctgatactctgattactgattattcgtctatagcttttgattttagcctattagataatgcgcgttctgtaattttcttcacttatgacttagaagagtttgaacgaacggtaggaattcaggctggctttaaggcagcctttctaaaccaaatggtaaatactgtggaacaacttaatgacgcgattttgtttggcaattcagataagaatgtgattcataaattaaatcaacaatggaatacattgaatgatggccgttctagtgcccgattaattaagcaagttaaagagagatgtacagatgagtagtttaaaaaaacaactaaaaattatcattcgatacgtattgattgttatcaacgatattttaactttattacccattaaaaaaggagtagttttatttgaaagttttaatggtaagggattaaccgataaccctaaggcaatttacgatcagcttttggagatggataatcaaactgctaaactactttattggggaattaagggtcaattttttgatgaaattgtacaacaatatccgaatgctcaaatattaaaaagatggtcattaaaatggatttggatttcagcaagagcaaattattgggtttttaattcaagaatgcccacttggtggaagaaaaatcggaatactaaatacgttcaaacatggcatggtacgcctttaaaacatttagcgacagacatggatcaggtgaaattacccggaagcacgcgagaaaagtacttaaaagaatttgttagtgaagctaaacgatgggactacctagtagctgcaaaccaatattcagaggatattttcaaaagagcttttcgattcagaaaccaatttctagaaacgggttacccgcgtaatgatatattagttcaaaaaaatcaaccaactgagattaaggcactaaagcaaaaaatcattggcaatggagaaaaaagagtcgtgacatatgcgccgacatggcgagaagacgattttatcagtgttggacattatcattttagatggcattttagtctaaaaaaaatgatgggcttacttcctgaagatgtgatgttattaattcgaccacattaccttgtaacagatcgaattgatattaagggatttgaagatcgcgtagttattgattcaacaactgatatgaatgaaatttatctgattacagatttaatggtgacggattattcatctgtaatgtttgattttgctattttaaaacgaccaatgttattttttgcgtatgacttggaatattaccgagatgatttgagagggttttattttaattattatactgagctaccaggtcccattgttaccgatgaaacacatttattagctgaaattgatcaacttcttcaaaataattttgcggagcttgatccagagcgctttaacaaatttgccaagcgttttgtaagttgggaaagagggacagccgctcaacaagtcatagaaaaaattaactatcggagggatgaaaaatgattattggttcacacgtcagtatgagtggaaagaaaatgtttttaggctccgttgaaacgagtattgaaaatggggcaaatgctttgatgatttatacaggagctccccaaaatacacgccgcaaagcaattgaagatttacgtattcctgaaggacgcgccttacttacagaacatgattttaaagacgtcgtggttcatgccccatacattgttaatttaggaaatacttttaaacccgaaagtttcaaattcgccgtggaattcttaaaagaagaggttaaacgggctgatgctttaggggctagccagttagtcttacatccaggagcgcatgtaggagcaggtcccgacgctgcgattgcgtcaattactgagggattaaatcaaattattacaccagagcaaaatgtgaagattgcgttagaaaccatggcgggaaaaggaactgaagttgcaactaactttgaacaaattcagcaaattattactggagtagagcacaacgaaaaattatccgtatgttttgatacatgtcatacgaatgatgcgggatatgatgttaaaaaccatttcgatgatgtaatggatgaatttgaccaaattattggtttgcagaaaatcggcgtaattcatttaaatgattctaaaaatgaaatgggcagtcacaaagaccgccatgaaaatcttggatttggaaccattggatttaaggcgctacattatattgctaattttgataaatttcaaaacgttcctaaaattttagagacaccatgggtaaaagatccagatgctaaaaagcattctccatatcaactagagcttgcaatgcttaagagtggcagatttgatgatacattgattgaaaaaatcatcaataattaaaaaatgtcatagggcaatgataacgagatatttatctcggtgccttatgacattttttagttttatacgagactttccataataattgtggcggtctcctcgatggatttattagcagtattaattactaaacaaccaatttttttaaagagttcgtctgcagattgaagttccttattgatactatccatattagagtaggacgattctggatttaaaccgtaagcaatcatgcgctgccgacgaatattatttaaaacttctttagtggtagttagtccaaaaatcttgttagagtctacctgccaaatttcatctggaatttgagtttgaggtaccagaggcaaattagcgaccttgtagcccttgttagcaaggtagagtgaaagaggtgtcttagaggttcgagacacacctaagaggacaatatcagcttttaagaagccagcagggtcttttccatcatcataggtgaccgcaaactccattgccgaaatcttatcgaagtattttgcatttagtgagtgggtgcgtccaggtttattttcaggggcgagattagttttttcagcaaataaattcactgccggagtcaatacgtccaaatattttaaagtgttttgattacaaaaatcggcagcatattgattcaattccggatttacaaaggtggaaaaaaccattgcatcttcacggacggctttattcaaaatactatctagtaaagagattgtatgaataaacggatgacgagcaaaattaaattccacatctagaaattgagcggctgctgcatgagcgacttgatcacccgtatcaccgacagaatctgaaagaatgtaaatattaattgattttttttgtttttccatattgtttaactcctcagtcttttggtatgatattaacatagttgctttaagttagaaaacgttttctgataaataaataactatcgccacagttatttattttatgttgacggtcataacttattcagttataatatttaagaaacatgagtacttagtacgaattgttatttcgaagctcggagggagggaatcacattgtcaaaaacagttgttcgcaaaaacgagtcacttgatgacgctcttcgtcgctttaaacgtacggtgtcaaagtccggtactctacaagaatatcgtaaacgtgaattttacgaaaaacctagcgtaaaacgcaagttgaaatcggaagctgctagaaaacgtaagaacaagaagcgtttctaatccgatcattgctcctgaatttcaggagctttttttgtatacttaaaagggagatttaaacatgaattttactgaacaacttaataatgatttaaaaacagctatgaaagcgcatgataaacttagtttaagcgtgattagaatgattaaatctgaaattttaaatgaacaaggacgagttggccacgaattgaatgatgaagacttttctgcggttatcaatcgtgcttacaagcagcgcaaagagtctatcaatgagtttcaaaagggtggacgtgatgaccttgttcaagaaactgaagcagaattaaaagttgttgaaaagtatatgccagaacaattatctgacgaagaactccaaacgattatcagtgatgtgattgctgaaacgggtgctacttctaaagctgattttggtaaagtaatgtctaagttaatgccaaaagttaagggaaaagcagacggttctaaagtcaatgaaatcgtaaaaaataccttaagttaggggacgtttacgtgaccgaagaagtatttgaaaaaaatctaatattatctgatccaaatttagaagtttcactattgggaaatcaggaacgttttatcccggtgcttgaagaagggatgaatgtaaaagtattaccatttggtgaacgaatcacaatcaaaggttccaaaaaagcagttgaacaaacttacgaagtactgaagactttattaaagattttaaggtcgggcgtccaattaaacagcgctgattttgtaagtgcaatgaaaatggttgaaaagggaactttggattatcttccagatttgtattctacaattttgattaaagatgctaaaggaaaaccagttcgaatcaaaaactttggtcaaaggcagtacgttcaatccgttaacgataatgatgtgacctttggtattggccctgcgggtactggtaaaacatacttagcggtggttatggccattgcagccttgaagaaaggtgaagtagaacgaattatcttaacacgtcctgcggttgaagcgggtgaaagtctgggatttttacctggggatttaaaagagaaggtggatccttacttacggccagtatatgatgccttgtatcaaattattggtgcagagcataccacacgcttgttagatcgaggagtcattgagattgctccattggcttatatgcgtggtcggacgttagataatgcctttgtaattttggatgaagctcaaaataccactaatcaacaaatgaaaatgttcctgacccgtttaggatttggttctaaaatgattgttaatggggatgttactcaaattgatttaccacgtggtacgcgaagtggattaaaagaagcacaattggttttacaaggaatcaataaaattgaattcgttaactttacagctaacgacgttattcgtcatccggtagtggctaagattgtacaagcctacgatgacaaagaagcgaaaggataaatctgatggatattcaaacatttgatcatactaaggaagaaaatcctaaaaatctcgaattaattaccgatattcttgaatttgctggaaattatttgcatttagatgaagaaacggaaatttcagtaacattaatgcataatgatgaaatacatcaaattaataaagagtatcgaaacgttgatcgtccaactgatgtaattagctttgcaatcaacgatgcagatgaggatattattatggatcctgaaatggcggaggaaattccggcaaacatcggagatttgatgatttcagttgataaagttgctgaacaagctgaatttttaggtcattcttatgagcgtgaattaggctttttatgtgttcatggtttccttcatttaaatggatatgaccatatggaaaaagaagaccaagaaaagatgttcccccttcaaaaagaaattatgaatgcctatggcctcaagcgataagcgccaaacgaaaaaaaatcgttcaatcttccaatctgtaggccacgcgggccatggattgtgggaagtgtttaatactgaacgtaatttccgttatcacttgatgattatggttgtcattattattgcgggatttatttttgcattgaatttgttggaatggattatggttttaggatgcattgcagcagttttggttgctgagattttaaattcagccattgaacgattagcagatttagctgctgacggtaaattccacccgttaattaagcaagcaaaagatattgcagctagtggtgtgcttgtcacagcgctatttgcggccataattgggttattaatttttggtaataagttattctaaattaaagaaacggatataaaatatggaagaaaacaatcaagcatttcactcaggatttgttgctattgtagggcgtcctaatgtaggaaaatcaacatttttaaactacgtgattgggcagaaagttgctattatgagtaacgttcctcaaacaactcggaataaaatccaaggaatctatacgactgatcgagaacaaattgtttttattgatacgccgggtatccataaatctcataataaattgggagactttatggtgcaatcagcaatgtcttcattaaatgaagtagacgcaattatgtttatggttaacgctgacgaacctcgaggagctggtgataattacattatcgaacggctaaagaaaattaccgatcgaccagtctatcttgtgatcaataaaatcgatttagtgcacccggacgaattattaccgattgttgattcatataaagatgctatggattggacagaagttttcccgatttcggcgcttcaaggtaataatattaatgaattggtgacaactttaagtcagcacatgcctgaaggacctaagtattatcctgatgatcaggttactgatcatccagaacgctttgttgtttcagaattaattcgtgaaaaagtgcttcaattgacccgtcaggaagttccacattcagttgcggtggtaattgaaacgatgaaatctaatgatgagggattggttaacattcaagcaacgattattgttgaccgttcttcacaaaagggaattgtaattggtaaaggcggaaaaatgcttaaagaaattggtagccgtgcccgtttagatattgaacacttactaggtagccgtgtttatcttgaactatgggttaaagtttctgaaggttggcgtgataaacaaggaattttgcaatcatttggttacaaaaaggatgagtattaaaagtgaacacagtcgccaatgctgattttaatggcattgtaatgtttgaacgaagccatcgcgaaaatgatttgttagttaagtttctaactaaagagcatggtaagcgaatgtttttcattagaaatgccaaaaaagtagattttaagttaagatcagcgattttaccatttagtcatggtcagtatacggggctaattcgtagtaacggtttgtcgtatattaatgctgcactagatgttcagcaatttgaaaatatttttcaagatatcacgttaaatgcttacgcaacctttgttcttaatttagttgatgcggcttttgatgataatgtcaaaatcacatcatggtttgagcggattaatcgcgcattaattttaattgacgctggaaatgatgctgaaattataaccgatttaatccaaattcaattattaaattcgtttgggatatcaatcacttgggatcactgtgtgatttgtgggcgaaccgatttgcctctagactattcagaagcgttcggtggaatgctatgtcaaagtcattgggaacgagatgagcatcgttggcatttaaaacctaagagtgcgcgaataatcggaattttaagtgcggttagtatttttaagttaggacaaatctccatttcaaaagagaccaaacaagaaatttggaatttaacagctgatatttataaaaatcaagttggaattaatttgaaaagtcgaagctttattgatcaaatgaaaaaatgggaaatttaagtgatttgacaattaactaaatttcttctatcatcattgtagttaatagaggacagtgaagaacgaagtaggccttataagttttcaaagcgagatcagaatggtgggagctgattaaaacaagtctacagggcatttggagtccgtgtaaaactaagttgccagcgattgctggaagtagggtggaaccgcgactcttgtcgtccctacgtagtgtatttttagtacactgcgtagggatttttttgtccgctaaattaaaaggaggaacttatgaataagaaactttcagtccaagaaattattttaacattacaaaaatattgggcagaccaaggatgtatgctcatggaagcatatgatacagaaaagggtgccgggacaatgagcccatacacatttttacgagcaattggtccagaaccttggaatgctgcttatgttgaaccatcacgtcgtccagcggacggacgttatggagaaaaccctaaccgtttataccaacatcaccaattccaagtagtaatgaaaccttctcctgaaaacatccaagagctttatttaggtagcttaaaagcccttggaattgatccattggaacatgatatccgcttcgttgaagataactgggaaaatccctcaatgggttgtgccggtgttggttgggaagtttggcttgacggaatggaagttactcaatttacatatttccaacaagttggtggtttagaagtaaatcctgtaactagtgaagttacctatggattggaacgtttgtcatcatacattcaagacgtggaatcggttttcgatctagaatggggtaacggagtttcatatggtgatattttcagagaacctgaatttgaacattcaaaatattcatttgaagaatctaaccaaacaatgctggaaaaaatgtttaacgattttgaagctgaagctaatcgtttaattgaagaaggtctagtacatccagcctatgattacattctaaaatgtagccataccttcaatttattagatgctcgaggaacagtttcagttacagaacgtgctggtttcttatcccgtattcgtaatatggctcgtaaggtagcacgggcatttgtggaagaacgtgaaaaattaggattcccattattaaaaaataacgaagaggaggtaaaataatggcacataattatttactagaaattggattggaagaaattccggcccatgttgtaactccaagtatcaaacagttagtacaaaaagtaacagccttcttaaaagaaaatcgcttaacatacgactcaattgatcatttttcaactcctcgtcgtttggcaattcgaatcaatgggttaggcgaccaacaacctgatattgaagaagatgctaaaggccctgctcgtaaaattgctcaagatgctgatggaaattggactaaggctgcaattggctttacacgtggacaaggtcttacggttgacgatattacttttaaaacaatcaaaggtacggactatgtgtacgtccataagttaatcaaaggaaagatgactaaggaaatccttacggggataaaagaagttgttgaatcaattaatttcccaacaatgatgaagtgggctaactttgattttaaatatgtacgcccaattcgttggctggtttctattctagatgaagaagtccttccttttagtaccttagacgtaactgcgggacgccgaacagaaggacatcgtttcttaggtgaagctgttgaactggctaatgctgaagaatatgaagcaaaattacacgatcaatttgtgattgttgatgccgacgagcgtaaacaattaatttcaaaccaaattaaagcaattgctgaaagcaatcgttggaacgttacccctaacccaggtcttttagaagaggttaacaatttggttgagtggccaaccgcttttaatgggggatttgatgaaaagtatttagctattccagaagaggtattgataacatcaatgcgtgaccaccaacgcttcttctttgtccgcgaccaagctggaaagctattgccaaacttcatctccgtacgaaatgggaatgaagaatttattgaaaatgttgttcgtggaaatgaaaaagttttaactgcgcgtttagaagacgctgctttcttctacgaagaagatcaaaaacatgatattaattattatgttgaccgacttaaaaaggttagtttccatgataagattggttcaatgtacgaaaaaatgcaacgagttaattctattgctaaagttattggaaacaccttaaatcttaatcaaacggaacttgatgatatcgatcgcgctacaatgatttataaatttgatttggtaactggtatggttggtgaattctcagaattacaaggggtaatgggtgaaaaatatgctcaacttaatggtgaaaaccaagcagtagcccaagccattcgcgaacattacatgccaaatagtgcagaaggtgatttgcctgaaagtgtaacgggcgcggtagtcgcattagctgataagtttgataacatctttagtttcttctcagctggtatgattccaagtggttcaaacgatccatacgcattacgccgacatgcatatggaattgttagaatcttaaatagccgtgattggcaattagatttaaatcaattcaagtcacaagttaagactgaattagcggagaaacatacagcatttggtgtggatgtcgatcaaaactttgaccaagtactcaacttcttcaatgaccgtattaaacaattgcttgatcatcaaaatattagccacgatatcgttgaaacagtacttactggtaataatcatgatgttacggaaattatcgaagctgctcaagtaatagcagatgctaaagcaagtactacatttaaagatgatattgaagctttaacacgagttcaaagaattgctacaaagaatgaagtgagtggtgaacttaatgtagatccacaattatttaataatgcttctgaaggcgaactttttgatcaaattattaaaattgaagctgcaaataatttgacaatgagccaactatttgctaaattatgcaagttgactcctgcgattagcaagtactttgacgcaacgatggtcatggacaaagacgaaaatattaagcgtaatcgtttgaatatgatgagtcggttagctaatttaattttaaaaattggggatctaactaacgtacttgtaaaataaaactctttttacaaggatgatttgaatctgcttaaagttaataaataaataaaacaagccatttagtctaacgagattaaatggcttgtttctttctatgcacaaattaagtaataaaaatgatatagcagcaaattaaaatgtacagacttgacagaagtgttaaaaacaagggcgttttaattgattctattgcttgactgctgtatcatactaacgtatgagtttatcttgcgaaagctggtgagagtatggctggaatgattccagaagatgtaattgatgatgttagaacatctgttgacatcgctgatgttgttggtagatatgtccagttaagaaaggcgggtaaaaacctatttggtgtttgtccatttcatgatgagaaaacaccgtctttttcggtttcggagagtaaacaaatttttcattgctttagttgcggacgcggtggaaatgtttttaaatttttgatggatttagagaatcttagtttccctgagtcagttcgtagagtagcggaatttggcaatattccattagatcagagttatttcaagtcaactagaaagtcgtcgtatacgattgaacaaagtgcattgattgatttatatgagaaagcttctgagttatttagccatattctattgaacaccaaattaggtgaagatgcattacagtatttgaaaaaacgaggaatgaccgaggatgatatcaagaattttgatattggatttgccgccccggaagacaatctcctgctaagtttttttaaagaacataagattgaccaacatttaatggctgaatcaggattgtttattgaatccgaaaatcaaacattaagagatcgattttttaaccgtattatttttccgattaaagatacaaatggaaaaatcgttgcattttcgggccgtagtttggttaaggataagaaccatcctaaatatttaaatagccctgaaacgagcatttttaataaaggaaaggtgctttacaatttttctcaagctcgttcagaaattatccaacagaaaacagtcatattatatgaaggttttatggatgtcattgctgctcatcgagcggctgtaaagaatggaattgcgacgatgggaaccagtttgactgaggatcatattaatgctatcaagcgggtggctgatcgcgtaataatctgttttgatggggatgcgcctggacaaaaggcaattgccagagcaattgagttattgaggcaatctagtgatttacaaattagcgtggtttttattcctgataatttagatccggatgagtatgtgaatcaaagaggaacagctgcatttcaaaatttgatgcagcaaactggggaatcaagtacttcatttcttttgaaatatgatcgaaccggtctaaatctagctaatgaaaatgatcagttagaatacttaaaacgagctttaaaacgaattagtagtctgaaagatgccctagaacaagatttgtatttaaatcaattatcagatgaatttaagattgataagcgtgatttaaaagaccagttaagagaaagtgtagcagatcgaatcgcgcatgcacccaaacagtttgaattggaagcgtcgacgcctccgccttcaccagaggcaatgggagatcaacccgtattcaatcaaaatattcaaaaaaagttatctaagatagatatttcggaatatcgtttgctagctcgtgcattaaataatcatgatgtttggctaaaattacagagcctacccaatttttattttccaaatgaaaagcttgaaacaatttatgtcttggctagtggatatttagaaaaaaatcatgaatataatgttgcagattttatggattatcttaaagaagatgagctacaagcagtcgttgctgatattgaatcaattaacctaagccctgaatttactgaagaagaaattcaagattatcttagcgtgattgaaaattttgctcctttaagtgaacaaatttcaaatgttaaatcggatttagatgaagctactagattaggtaacaaagaattacaacaacaactaactttaaaacttatcgcgctatatcaaaaacaacaacagcttcaaaaataatagggggatcagcataaatggcaaacaaaaaaactgaaacaaaaaagaaaaagagtgaaagtatcatttcttcacctgagtttaaaaaagctgtcaatcaaatcattaaagctcgtaagagtgaaaagaaagttaaatatacacaattaactaaagatttgattactaagtttaaattaactgacgaagatgttgatgatcttattcaacgcattgaagatgctggaattagtgttgtcgatgaaaatggtgatccaagtgaaaaagctttgaaagctcaagaaatttctaaggaagaattagatgatacaaaggctcctgctggagtaaaaattaatgacccagttcgtatgtaccttaaggaaattggtcgtgtatcacttcttactgctgatcaagaagtcgaattagctttaagaattgaaaagggtgatccccgtgcccgtcaagaattagcagaagctaaccttcgtttggtagtatcaattgctaaacgttatgtgggtcgtggaatgcaattccttgatttaattcaagaaggtaacatgggcttgatgaaagctgttgaaaaatttgactaccaaaaaggatttaaattttctacgtatgctacatggtggattcgacaagccattacacgtgcgattgccgatcaagcgcgtacaattcgaattcctgttcacatggtggaaactatcaataaattaattcgaattcaacgtcaattgctccaagatttaggtcgtgaaccaatgcctgaagaaattggtgctgaaatggatatgccatctgataaagttcgtgaaattctaaaaattgctcaagaaccagtttcattagaaacaccaattggtgaagaagatgactcacatcttggtgatttcattgaagatcaagaagcaactagtcctgctgaccatgctgcatacgaattgctaaaggaacaacttgaaggtgttctcgatacgctaactgatcgtgaagaaaacgtactacgtttgcgctttggattagatgatggacgtactagaactcttgaagaagttggtaaagtatttggagttacaagagaacgtattcgtcaaattgaagcgaaagctttacgtaaactccgccatccatcaagatcaaaacaactaaaagattttctagattagttaacccaagaggttccgtgcaggtcgtagatttgtgcaggacctttttttgaaagatataactataattacgaaagatagtaggggtttattttatgaattcgaataatttgtcaccaagactaaaaatagttgctagtttagtaccacaaggttcaagaattgcggatattggatcggatcatgcgtatctagcgattaatttaattaaaaataagattgctaaccatgcaatagccggagaagtcgctcctggaccgctctctaattcgaaagaagaaatcgaaaagagtggggtagttgatcaaattgaagcacgtttaggtgatggattagctgttattcaagataccgacaccgtcgatgtgatttgtattgctggaatgggtggccaattaattcgaaaaattttaaatgacggaaaaacaaaattaaatggggttaagaaattaattcttcaacccaatgtcggagagttggaattaagagaatggttaattagtaataatttcaaaattacccatgaagatatcgtggcggaggaccatcacttgtacgaaattatcatggcggaacctggacagatgactttatccgagaaagagcaaatgtttggaccaattttaatgaaaagtcataatgaggtgtatacacgtaagtggcagcgcgaattaaaccggttgagaaaaattgaagcaaatctaaatgctcatcctagccatggacaagctaaactagaccaagttactaagcaaattagcgatattgaggagatgttttcacatgttatctaaaaaattaattgaccgttttgaaagcttcgcgcctaaaaccattgcttttactaatgatcctgtgggtttacaaatcggaaatgttaataacgatattaaacgagtaatggtgactttagatgttcgacctgaagtggttgacgaagcaattaaacaaaattgtgatatgattttttcgcaccaccccttgatttttcgacctattaaaaatttagatttaagcaacccgcaaaatcaaatgtacgctaaattaatccaaaattcgattttggtttattcagctcatacaaatttggacgttgctaaaggtggcatgaatgattggttgacggaagcaatggggttaaatcatgtccaaacggtgtattctaaccattacgataccaatattggtcgcatcggagtcttaccaactcctgtaactgttgaaaaatttgctaaaaccttgaaaaaaacttttaacttagatgggttgcgcttagtaacaagtgacaatgaagctatggtaaaaaacgttgcagttgtaggtggtgatggtggtaaattttatcctgaaatgctcaaagcgggagcagacgtgtttgtaaccggtgatgtttattatcatacaggacatgatatgttagcggatggcattaatgtagtcgatgtaggtcataacgtcgaaaaaatatgtattcctaagttagcttctttattcaacgaatggaaggctaataatgattgggaagtcgaaattatagaatcgacgattaataccaatccttatcaatttatctaaaaattgggaggcgatttaaatgaatccagagaaaatgactacggcacttcaagaagcaattagcgaagcacagcagattgctgtaaatcgtcaacatcaagaaattggtgtgccagaattatttaaatttttaacacaaccagaccaactggtcgggacactattaacagacttaaaggttgataataatcttgtccaaaccgagttagaccaggaacttgaacaaattagcgtggttagtggtagccaggttagttacggtcaatcgatttcagcagaactaaatcaattattagttcaagcagaacaacagcgtaaaaaattacaagatgagtatgttgcaattgatactattttaattgctttatttaatttagatcagaatcagtttaaaaaattcctgaatcaacaaggtctaactcaaaaacaggttttagccaaagtagatgaatttcgtgggggtgaaagagtgacatcaaaggaacaagaaagtggatataaagcactagaaaaatatgggacagatttagttaaaagggcccacggtgaaaacccagatccagttattggacgtgatgaagaaattttagaagttattcgaattttatcgcgaaaaacaaaaaataatccagtactaattggtgaacctggtgtaggaaaaacagccattgtagaaggtctagcgcaaagaattgctaagggtgatgttcctagcaatttagttgataaaaccattgtttctctagatatgggttcattaattgctggggctaaatatcgaggcgactttgaagaacggcttaaagcagttttgaaggaagtatcaaagtcagatggtcaaattatcttattcattgatgaaattcacacgattgtgggagcgggtaagactgaaggtagtatggatgctggaaatcttttgaaacctatgctagctcgtggtgaactccatttgattggtgcaacaacattagatgaataccgcgaaaacgttgaaaaagacaaggcacttgaacgccgtttccaacgggtgctggttaaggagcctagcattgaggatactatcagtattttaagaggtttaaaggaacgctttgaaattcatcatggagttcgtattcatgataatgctcttgtggcagccgctaaactttctagtcgttatattacggatcgttatttaccagataaggcgattgatttaatcgatgaagcatctgcaaaaattaaagtggaaatgaattccaatcctactgaactcgatcaggtcaaacgacaattgatgcgtttgcaggttgaagaacgagcacttaaaaatgaaagcgatgcagagtcagttaaacgtttaaaggacttacagaaagaattatctgaaaccaaggaagaaaaagttaagctggaatcacgttggtcagcccaaaaagaggaaattaaaaagatcagtgataagaagaatgaattagataaggccaagcatgatttacaagaggctgaaagttcttatgatcttgatcaagcggctattttacaacatggaaccattccagctttggaaaaagaattggaacaattagaaaatcaatccgaaagtgatcatggggattggttggtagaagagtccgttacagataaagaaattgcccaaactattagtcaaatgacaggcattccagttgcacggttggtggaaggtgaacgagaaaaactgctacatttagctgataaattacacaatcgagtaattggccaagatgaagccgttcaatccgtttcagatgcggttttacgttctcgtgcgggactccaggatcctaatcgtccgattggttcatttctcttccttggtccgacaggggttggtaagacagaattatctaaagctttagcagaagcgttatttgattcggaagataacatggtccgaattgatatgtctgaatacatggaaaaagaatcggtttcccgtttggttggagctgctccaggatatattggttatgaagagggaggccaattaaccgaagcggtccggcgaaacccatattccattgttctatttgatgaaattgaaaaagcacatccagaagtgttcaatattcttttacaagttctagatgacggtcgtttaacagatgggcaagggcgtacggttaactttagaaatacaattttaattatgacttctaacttaggttcagatttgctattgaagaatcaatcagaaaataaaattgatgacaacatccgtgaccaagttcaagatgttttgcatggatactttagaccagaatttttgaatcggattgatgatatcattatgtttaccccattaagtaaacaagatgtacgccaaattgtgattaaattaattcataatttatctatacgtttgagcgatcaagaaataagtttaagcatttcggatgatgcacaagattatattgttgaacaggcatatgatccagcgtttggggctcgaccattgcgccgctacattactaaaaatgttgaaactcctttggcaaaagaaattattagtgggcgtgttcgtcctaattcaacagttaatatcgacgttttgaatgatcaactggttttccagaataaataaaaaaaggatgctatctttggtaaaaataccaaagacttgcatccttattttttaggttttgaaattagtgggatcatgttagaagtaataagagctactacagctgccacaataccaatttctaaacgtgtgtatggtagagcatcgagttgaccaccaatgtagccaataacttcaccaaaaacaaatgcccaaaaaataactacgacttgtttcatttcgtttggcccctttctgaacaacagtaattttagcacaattacgtggggaaataaattaaactctatatttttggagaaggggaatttatttagtataattataaaaaacaggaggggataaggatggcttttgtgccactgcaagtattaagttcttacagtttattatctagcccgattaaaattgatgacttaattgctacggcgaaaaatcgtggatatcaagcgatgaccctcaccgatcataatacaatgtatggaacagttgaattttatcaagcttgtattaaaaacaatttaaagcccatcgtgggtttaacgctttggttagatagcacgacgggaattgacaatcaatttgcgctagttttaatagctaagagtgttaaaggttaccgtaatttaatgcagattagttcggccaagatgacgagtagtgcaccaaaatttgtttttgatgatattaaagatttgctagatgatttaatcatgattgttccagcacaaagatcagaaatgattgaattgttggagcgagggctatccggtgatgcaaccgagcttttagaaaattatcgtcaagttgttggtgataaagatctttatctaggaattaatttaaagcaaactaatattatgcgtcaaaccttgatgcaaattgccgaaaaacacagtcttggttgtttgcccttaccgagcgtggaatatttaaatagtgaagaccattttgcaactcaagttttgaaggatattgcttcgggggaagttatcaagcatcctgaaatcctagcaaaggaccaagggaataattggttaaaaccgcgagatgtatttgaaaaagagtatcgggatgccggattgagtggtttattagaccaactagatacgctaactagccaaatcgagctaaaaattccgtttgtccagcccaaattaccaaaatttcccacgccaactaatcaatcggctattcaatatttaaaggaattatgctttcaacagttagaaaaaagtaaaaatgctcaaaatttgcaatatcagcaaagattggatcgagagcttaatgtcattgaatccatgggttttgcggactacttcttaattgttcacgatgtggtccaatttgctcatcaaaatcacatcttgactggaccgggacgtggttcagctgcaggctcgttagtagcttatttactcaggattactagtgtggatccaattgaatatggactgctatttgaacgcttcttaaatccagaacgtgcccaaatgccagatatcgatttagatattccagatgataaaagagaattgatgctcaaatatgtccatgataaatatggacatcaacatgtggggcaaattatcacatttggtactttagcagctaagcaagccattcgcgatgttgcccgtgtttttggggaaatgccgaataaaattaatcaaataagtgcattaattcctagtgaactaaatatcacattggagcgtgctttagaaaattcaagtaagttacaagagtttataagaacttccgaaaaaaatcgatttatgtttgaaacggcgcggcgcttagaaggattgccacgtcattactctacgcatgcagcgggaattgttttaagtgaaaataatttaaccgaaaccactcctgttcagaatggaaatgaaggaatgctgatgagtcagtattccaagaattatgttgagcgggtagggttgttaaaaatggactttttaggtttaagaaatttgtcattaatggctaatattttagatcaagtccatcaacttaaacccgattttgacatcgagaacattaatttaaatgatacaaagactttagaacttttccaacgaggcgataccagtggcatttttcaatttgaatcggctggtattcggaatgtattgagaaaagtgaaacctaatcaatttggtttagtagttgcggtaaatgcgctttatcgtccaggaccaatggaaaatattgatcgatttgtaaaacgaaaagaacatcgcgaacactattcttttcctaatgacgttttatcggaaatcttaggtgaaactttcggtatcttagtgtaccaagaacaggttatggaagttgcttcagcaatggggggcctgagtttgggacaggccgatttgttgcggagagcgatgagtaagaaaaaacatgatgtaattgaacaaatgcggacgaattttattgatggagcattgcaaaagggatataacgccaagttagcccaacaagtttatagttatatcgaaaattttgctaattatggttttaataagtcacatgccgtagcttatagcaagctagcttttcagctggcttatttaaaaacgtactttccaggtcctttttatacagccttacttaattcagttattggtggtgaggctaaaactaaagaatacattcaagaattgaatcgtttagggattaaagttaaagcaccggatattaatttgagccaactacaatatgcattttatcaacaacaaattatcatgggttttctatcaattaaaggattaaggcgagatttcatccgtaatttgattgaagaacgtcaaagtaatggagaatttaaatcagttgacagtcttttacgtcgaatgcgggataagggtattacagaagaaattattgaaaaactaatcttttcgggaactctagattcctttggatataaccgagcggaattaggtgactttttacctgaattgttgaaaggtattgcttttagcgggcaaaatgtggatctttttgaaaagttaatgcctacgattaaacatcgaccggatatggatttggatgaaaagctggattgggaagaagaattattaggaacttacatttccgcgcatccggttgaacgctatgcaaacttgattgaacaaaatgggtttaaaaaaatcgatgaatttagtgatgaagctcaagtgactacgattgtatatataagaagtattcggaccatcagaactaaaaaaggagagtcaatggcctttgcgaatatcacggaccctactggagaaaacgaagcagttatctttccaaggatataccagcatgctaaaattttgagaaacaaacgagtcctacaattacgaggcaaggttgagaaaagaaacgacggtttacaattaattgttaatgaaattaccgcccctcaaaccaaacaggtccaagcagcaatttggaaattagaagtgcctagccgaaataattcatcagaattccaaaccaaactatttgatattttcagaaaatatcatgggaaagttccagttattttagtttatgaggatactaatgaacataatgagttgtctgaaaaattttatttaaatgacagttctgaagtaaaagagcaattagcagaattgctaggaagtcaacatatttcgttaattaaaaaataaattttgaataaagcacttacattcgattaattaagaaaatggtacagacaactgttttcaaaagtgataaaatcaacaatgaagttttgaaaaaactcaatatttctgtttgaggtgaaaagatgaaacgtattggtatcatgacaagtggtggggatgctccagggatgaacttggctatccgcgccgttgcaagaaaggccctaagctctggtcttgaagcttacggaattaactacgggtttgccggtctagttgctggtgatatccacgaattcaaggcagcagatttagacgatatggtttcacaaggtggaacgatgctttattcagctcgttatcctgaatttgcacaagaagaaagccaattgaaaggtattgaacaacttaagaagttcggtatcgatgcattggttgttatcggaggagacggttcatatcatggtgctcttcgtttgacagaacatggatacaacaccattggtcttccaggaacaatcgataatgatattcctttcactgacttcactattggttttgatacagcgttaaacactgcagtcgacgcgattgataaaattcgcgatactgctaagagtcatcaacgggtctttgctgtccaagttatgggccgcaatgctgctgatattgctctttgggctggtgttgcttcaggagcagatgcggttatcgcacctggttttgattatgacgttgaagcaattgccaacaagttgaaaaagaaccgtgcaaacggtaaggactacggaattattgtcatcgctgaaggtgatgctaattcagatgcagctcctgaattcattgaccagcttaagcaatacggcgattttgatgcacgtgctactgtaattggacatgtccaacgtggtggtgttccaagtgctaaagatcgcgttttagcaagtaagatgggtgcttacgctgttgagctactccttgaaggtaagggtggtttagcagttggaatcttagaaaataaggttcaagctcataacatgcttgacttgtttgatgcaaaacatcaagcagatgattcactttaccaattaagtgaagatttatcattctagagttctattaatatttggataaaatgacttaagaagtcttttataatttaaaatcaagggagagattctgtaatgaagaaaaccaaaatcgtttcaacacttggtcctgcaagtacttctgttgacacaattgttaaattaattgaagccggtgctaatgtattccgctttaacttttcacatggtgaccatgaagaacatctaggtcgttataacatggttaaagaagcagaaaagattactggcaagtcagtaggtattttgcttgatacaaagggtgctgaaatccgtacaactccacaaaaagatggtaaccaagaatatcacacaaatgataaggttcgcatctcaatggatgacactttggaaacaacaaaagaaaagattgctgttacatatgatggactttttgatgacgttcatgttggtggacacgttctttttgatgatggacttcttgattttaagattgacgaaaaagatgaagaaaaccgtgaattagttgctcatgcaactaacaatggtgttcttggatcacgtaagggtacaaatgctcctggtgtttcaattaacttacctggtattactgaaaaagatgctgatgatattcgttttggtcttgaatcaatgaacatcaacttcatcgctgcaagttttgtacgtaagccacaagacgttcttgaaattcgtgaattgttggaagaaaagaacatggaagatgttcaaattttccctaagatcgaatcacaagaaggtatcgacaacacagacgaaatcttgaaagtttcagatggtattatgattgctcgtggtgacatgggtgttgaaattccagctgaaaatgttcctttggtacaaaagacattgatcaagaagtgtaatgcagttggtttgcctgttatcacagcaactcaaatgcttgactcaatgatcgaaaacccacgtccaacacgtgctgaagcttctgacgttgctaatgctgtttgggatggtacagatgctactatgctttctggtgaaagtgctaatggtgactatcctgttgaagctgttgctacaatggctaagattgacgaaaaagctgaaaatgctatggctgaagacggaaatcttcaaatcaacacatttgatcaaagtgatgttacagaaacaattagtgctgctgttgctcgtgctgctaagaaccttggtgttaagactatcgtcgctgcaacacaatcaggttacacagctcgtatgatttctaagtatcgtccagatgctgacattcttgcaatcacatttgacgaacgtgttcgtcgcggtttgatggttaactggggtgtacacccaatcatcgctgaccgtccatcaacaactgatgaaatgtttgaactagctgctaacaaagctgtagatcttggtcttgctaaagaaggagacttgattcttgttgttgctggtgttccagttggcgaaagtggaacaacaaacatcatgaagttacaactaattggttcaaagcttgcttctggccaaggtgttggtgatgaaacagttattggtaaagcagttgttgctacatcagctgatgaagctaacaaaaaagctgttgaaggtggagtgcttgttacaaagacaactgacaaagactacctaccagcaattgaaaaatcaagtgctttagtagttgaaaatggtggtttgacatcacacgctgcagtagttggtatttcaatgggaattcctgttattgttggtgtacaaaacgcaacttcaatcctttcagatgatgaattgattacagttgactcacgtcgtggtattatctaccatggtgcatcaaactcactataaaaatttaatttaaatttttaaaacctggaacattatatgttctaggttttttatttggcagaatgaaagtcgaatttagactgttagggttcttgtattaactaaaaagggatactactaatttcattactttagtagtatccctttttagttaatacaaattataaattcaattatggatcttaactccaacgattttccttagaaggcaagatcattaaaataaagaaccagattgtaccgattagtgggatgatttcaattaaaatccaccagccacttcgatcggtgtcatgtaaacgtcttactttaagtgtccacatacccagccaaacgatgaatgcaatgattttagaagctagattaatattcaaatcacttagattgtagatgtcttcaataggatgaccagtaatagattggataattgcgatgatgattacacctaaaatataattgataataactggccaccagtagtcgggacgattggcagtacctgaaaaattggtgatattatgccagaattttttatatgattcaaccatcaatatgtcacctccaatgcaataaacagcttttaaagacttcagtatttagtcataatgtagtttttattacattttagtatagcaaaggtagtcaaaatgtctaataaagtgaatgtttaataatataattggcaaagataatgctgaatttagaaataatcctacttgggatttattgtttgattaagaagggtatattaagttaatgctatgggaataagaaattagaggcgaggaaacctctagaaatatgttagaatgtagaatgaatgaaaattgagaagcattgtgcttctgcgaaggactgtccgtcgtttttgacggtcagttttttaattactaattggaagataattaattgtagtgttggcccttaaggaaccctgatatattgatgtcggttctatggactaatgtacatatattatgtaaactagaaattggagtggaatttaatggagagttggctatttttgattggaatctttattgtggcgttattaggcaaaaatcaatcattaattatcgctagtattgtagtactatttttaaaattaataccgtactcagataaaatttttcctttattaaataaacaaggaataaactggggggttacgattatttcaattaccattttagttccaatagcaactgggaagattgggtttatggatttagttaattcatttaaatcaccggtgggctggatagcagtagcttgtggtatcttggtctcactattgtcgtatcagggagtaggcttcttatcagctagtccagaagtgacagttgctttagtaatgggaactatcattggggtagtgtttatgaatggcattgcagctggaccaatcattgcgtcaggaattgcgtatttgattattcaacttttacaaattcaaattaaataaaaatgggtgaaataaatatggatacactattaggaaaagtcgaaaaaggtaaagttattgatgaaaatgatgattattattttgttcaattgtcagatggaaatgcctatcgacttgataaaaaagaaattaaaaaaccactgaagaagggtagtttctttactggatttacttatgaaaatgcagatcatgaccgccaaataacacgtgaaacgccacgagcaactgctggcaaatatggttggggaacggttgttaaaacgcgtaaagatttaggagtcttcgttgacattggtttacctaataaagatattgttatttcgttagatgaattaccaacagaaacaaatatctggccgcatactaatgatcgtattttagtttgtctgtctgtagacaaaaaggaaagaatgtgggcacatccagctgactatgatgtttttaaggcaatttctgctcgagcagataaaacaatgattaataaaaatgttaatgcaacggctttccggttaaagatggctggttctttggtattgactgataactttttgttaggatttatccatgcttccgaacgagatcgagaaccacgattgggcgaacaattaaatgcacgggtaatcggggttcatccagatggaacgttaaatttatcattaaaacctaggaattatgaggctctaggtgatgatgcagcaatggttttagccatgctacaacatacccaagaccaaacgctaccattcaatgatcatagcaaaccagatgcgattaaagaacgttttggtattagtaaaggacgtttcaaaatggcattgggacatttgcttaaggctggtgtaatccaacaaactgaagatgggattgttttaaaggagaaatagtcatgaatgatttaatcaatgactatttacattctcttaaagtagagcgaggcttatctgataatacaattattagttaccgccaagaattacgtcacttgaatgactatttgactaaagaaaaaattacagatataaaaaaaattgatcggtatacaatcttagattatttagatgagctcaagaaaactggtagggcaagaagttcttcaattcataccatttcaagtttaagaaagttttttaagtacttattgattgtggataagattgatgttgatcccatggttaatattgatccacctaaaagagctcaccatttgccttcagtactaacgacagcggaagtagaaaagctgttgcaggttccaaatacaaatgaaccacttggaatgcgggatcgaactattctagaagttatgtatgcaacaggattacgagttagcgagttaattacattgaatttaaacgaactccatctggagatggggctaattgaaacgattgggaaagggaataaaaaacgaatcattccaatcggtgacgtggcgattaaatggcttaatcgatatattaatggaccacgtagaattttattgggtgataaaaagtacaatgaaatcttcttaaaccaacatggacatccattaacaaggcaagggatttggaagaatcttaaagctcaggttaaaaaagctggaattgaaaaaaatattactccccatacccttcggcattcttttgcgacccatttgttagagaatggagcagatctcaggattgttcaggagctattaggtcatgctgatatttcaacgactcaaatttacacgcatattacgcagcaaaggttggttgatgtatatgacaaatatcatccacgagcctaaagataaaggagcaacatgttagtaaaatattcggattcaaaaagacaaattgcgatgggattattgtcgactgttcaagcatttaattcaattgatgtagtacggttggtcttagagcggtttactaaaggaaatcgacagatttatttagagcgaaaagatggaacttatattggaatcgtaatgattatcttagaagaagagtgtcttgtagttgatcgcatggcttttattgcaaacgaggaaacagtattcaacgaaaatgaaattttaagatcattaacttctatctatccagaccgtcgtttaatggggtcgttaaaaactagcgcaatgattgaaagattcgaaatggggcaggtaaatgaaagctgaaaattataccctaccaaacgttaagctagctgaatttgagggaccgctagatttattattacatttgatacgaaaatcacagatgagtatttatgatataaaaatatcagaaattactgcccaatatttacaatacttacattcacaagaatcgctagtgttaaatattgctggagagtatctagtgatggctgcaaaattaactgaaatcaaaggaaaattactactaccacatgatgaagaagtgattgaggaagaagatccacgtaatgacttagttgatcaacttttagtttatcaaatgtttaaggaagcttcggaaggcctaaaatcacttgaaaaagaacgacagacctcgtttacacgcccagaaatggaaattcctcctaatgaagctaatcgcttagctccgggcgttaaaataagtgacttacaattcgcacttcagaaggttttagcgcgccaagcgctcctagaacccacttatagaaccgttaaagcagaagaagtcactcttgaagaacgaatgtcagaaatcaaaaaacgtatttttgatttaaagcaatgctgttttgaagatttatttattggacattttagccgagaaacattagtaacaacctttatggcaattttggaactagctaaaaatcatcaaatcttacttgaacagccagcaagaaaacaatcaattttaattaagttaggtgaagtttaatgaataatgagcagaaagtagaagccctactttttgtagcaggggctggaggaatttcagttgaagaactatctaatttcacgggttatgctaagcctgctatactaacgatgctagataatcttgaaaaaaattacgaagttaattctaaaactgctttgaagctaatccaaactggtggtacttacaaactagttactaaacctgagttagcatcgattttagaaaagtattttgatcgaaatagtcgctcaggactatcgcctgcagcattagaaatattgtcaattgtggcttatcgtcaacccataacacggattgaaattgaccaaattcgcggtgttcaaagtggcacgactttacagaacttagtacttagaaatctagtgaaagtggttggtagacttgaagagcctggaagacccaaaacgtatggtacaacagatgagtttttagattattttggtttagaggatattaaaaatttacctaaacttgaaaaagttggagaagattcagaattagacgatagcgatttatttttacaagagtttgaatcaaaaatgaatttaaataataaggagaaataaatggaagaagaaagattacaaaaagtaatggctgaagcaggagttgcttcaagacgaaagtcagaaaaattaattactgaaggccatgtacgtgttaatggtaaggtgattaaacagctaggtacaaaagtaactgcccacgataagattgaagttgatggtgttcctcttcaacgagaaaagatggtttatttcctattaaataaacctcgaggggttattacatccgttagtgatgataaaaagcgtaaaacggtcatggactttttccctgacgtagttgaacgtatttatccagtggggcgtctagactatgatacttcaggtgccgttttaatgaccaatgatggaactttagcaaatggtttaactcaccccaaatttaagtttgaaaaaacatataccgcaaaagttaaaggaattgttaatagtttagatttaaagaagctagaaaatgggttggtaattgatcataaaaaaacagctaaagctaaagcacacttaattagcacggatgatgaaaagaaaacttcgattgtgagcctcactatccacgaagggcgtaatcatcaagttaaaaatatgtttatggcagttggtcacccagtccaaaaattacgccgtgatagttactcatttttaaatattgatggagtgcaatctggaaaatggcgtgctttgaaggttaatgaaattagtcgtctaaaacgtcaaattgaaaaatgattccagaagatgttttagctttttttgatcttaagcaggggcgccgtccgaaggcaattttgaatgtattggttggtaaaatgacggtttcggccttattttggggcttagaatacgatattttggagtacctaaatttctggaaaacaattgatacaatctcttttctagaaaatgttgaccgagctgttgaaggtggttttttagccaaaaaggatgagttgatttatttgacggaggcaggacaacaaaagcaattcagttgtacgactcctacgccttttattaaaaaagttcggctcgatgaggcaattaatttgttgctattagctaaccaggtaatttccgaatttagttttaaaaacaatcgttatatcccagttagtgataatcttcgaattaatgtgatcttaaagaattggtttaagcaacttaagtcaaaaaaccatcatacgacagaccttgttcagaaatatacgcagggtttagatgagcttttaagtcaattacaacagcacgatgcagacatcttgcttagttatcttcccaatcatgttgatccggggtggactattgatcaactagctcaggcatttggaatcagcaaatttcaaatggaacttaaaattaggttgatttttagcaagattattagtgatgctgttttaacaaaaacagcaccgtttgttgatttattaaattcaaccattaaagaaaatgttatgccagatagcacttatcaaacgtggcaattaattcgacaaggtaaaacggtggacgaagttgcacgtttgaaacatgttaaaactaataccgtgaaggaacacatcttgatggcagcaattttggattctaattttccatttgataagtttgttagatttaattttgagattgggaagcatcctacagaagttgactttagaagtatccaaagccaaattgcagatattacattttttgattttaggctaatccaaatcagaaaaattaaggaacaacagaataataatggtaacagataaaaaaatttatcaagtcttacatgagaaatttaattttactgagtttaaaacgggtcagttagaaattttacataaactttttgaccatcaccatacattggcgattttaccaacaggagctggaaaaaccttaatttatcaaatgtatggttttttaaatgagggctccgttattgtggtttcgcctttattatccttgattaaagaccaaatcaaccggttaagattaagtggggaacgtcgtatagcagagataacttctcaaatagattttatggagcaaaagcaaatccttaacaatttagaaagatataaatttatttttatatcacctgagggattgcagcgacctgatgttcaagcagcgatgcgacgaatagagatcgacttatttgtagttgatgaagctcattgtatcgttcaatgggggaagtcgtttcgtccagactacttaaaaattggtcggatacgaacgcaattaaacaaccccctaacattgatgttaacggccacagctggaaaaacaacccgtgaagaaatcgttaggtaccttaatttgaaaaaaggtgaggttgaagaatatattagttctgtcgatcgctccaatatctatcttgattttttagaagtcgaaagtagaagtgacaaagatgaaaaacttttagatttacttgatgagttaccaggggcaggaataatctacttttcaagtcgcaaagttgctagccaagttagcgaaatgattaataataatcttactcttacttcggctccatatcatgcagggatgacaaactatgaccgttttcaagttcaaaaacagtttcaacaagatcaagtcaatgtgatttgtgctaccagtgcgtttggaatgggtattgataaagctaatatcagatatgtaattcactatcatttgcccggagacattgaaagttatgtccaagagatcggtcgtgctggtcgcgatggacaacagagtattgctattatgttgtatgcggctggcgacgaggtaattccttcaattttaaatgatattgaaattccttctgaagcaatccttactgaaaatcttgaacgcagtggtatagatgaagagcagaaagaattaattaaatattatcaagaaaatgggttaactcctcaagaattaacagagctatttaaaagacaacaattgcaaaatgaacagcaaatcttaagaatgttaaaactcattcaaacggagaattgtcaccgtcaatatttgctacaatattttgatgagggcttcaaaaaacaccatgatttatgttgtggttcaatcaatactttcgaaaaattaaagttagaagctaatttaacaactaaaaaaatgcaaattgaaccttggaaatcgagattaaataaaatttttgcaggaatatagcgtaattttcgtggtcattcaaattgaattattgtaaaatacaatttattggtatgtagtaggaggataaacatgaacgagaaaaatgatgggaacttaaaggatgagcaaacaccggagaattcagatcaaaaaccaagtagtgaagaaccaagcgctgatcaacaggcaggcgccgaggattctgccactactggaggacggggagaattccataaaaataaaaagaaatctaagaattttgctggatcattaatttgggtgattgttattttagctatcgcgtcgctagcttattacatgacacaaaaacaagattttcaacagaagacggcgaatacaacaactacacaggtagctaaatctagtagtgataaaaagaaatcaagtaaatcaaaggcttctaaagaagaggatgacaaatcttcgtctatcgctaaagctgaatcagagtccaaggctaaagttaagtctgaatcagaatctaaagcggcagcagctagtgaagatgcaaattcgactagtgaagcctcttctgaggtaaccagtgagagttcaagcgtagaacaaagtgatgccacaagtagctctagtaccgatggcaacgcatcttatgcaactgttcaatctgggcaaggtatgtatcgggttgctgttaacaatggtatctcggttcaaaaattaatggaattaaatggtttaacaagtagttcagatattgaaccaggacaacaacttagagtaaggtaggttattagtgtattcatgaataataaatatcaaattgcaattgatggtccggcatcagctggaaaaagtacagttgcaaaaattgttgcaaaggatttgcaatatgtttattgtgatacgggagcaatgtatcgagtggtaacccttaaggccattcaaaatggtattgaccttaacgatgaaacaaaaattagtgaaatgcttaatgatacggatattcgcttcgaaccaggtgagccagttcaaaaggtctttctggatgggaatgaagttacggaagatattcgccaagccaacgttacgaactctgtatcaaccatcgctgctcaaaaagcagttcgagaagttttaactaactggcagcgtgatcttgctaagaatggtggcattgtaatggatgggcgcgatattggttcagctgttttaccaaatgcagaagttaaaatcttcttaattgccagtgtccaagaacgtgccgaacgtcgttataaagaaaacatagctaagggtatggaaactgatttagagcaacttaaaaaagaaattgaaattagagaccataaagactcaactagaaagatttcaccattgacaaaagccagtgatgcaatcgaggttgatacaacttcaatgtcaattcaagacgttgtaaatgaaatattacgtattgtagaaaatgcatccaagagaaagtagcaacaattactagcaattggagcagtttttcgatattatatatgtataagtgctgtaaaagggggatttattcggatggccgaaaatgatgttaatcaaaacagtgatttactcaacgcaattaatagcgttgaagaagtaaaagttggtgatgtagttaccggtgaagtattggatattgatgacgatcgtcaagtgatcgtaggtattcaaggtgctggtgtagagggtgttgttcctttacgtgagctatcaactcaacatatcgataatattagtgatgaagtaaaaattggtgatgaactagaacttgttgttatctcaagaatcggtgatgacaaggaaggtggaagttaccttctttcacgtaaacgtttgttagctcgtaaagtatggaaagaaattgaagaaaaagctgctaataatgaagaacttgatgtccctgtaacacaagttgttaaaggtggtttggttgtagatgctggtgtacgtggatttattccagcttcaatgatcgaaaatcgttttgttgatgatttgaatgcttacaagggtcaaactcttaaagttaagattattgaagttaagccagaagacaaccgtttaatcctttcacacaaagctgtattaaacgctgaacgtgaagctaaacgcggtgaagtacttgcctcaattaaagaaggcgatgttgtaactggtaaagtagctcgtttaacaaactttggtgcatttgttgaccttggtggaattgatggacttgttcatatttctgaaatttcataccaacgtgttgacaaaccttctgacgtgcttaaagccggtgaagaagtgcaagttaaagttctttctgttgatgcagaaaaagaacgtgtttcactttcaatcaaacaaacacaaccaggaccttgggacaatatcgaagaaaatgctccagaaggtgctgtattagacggtaaagtaaaacgtctaacagatttcggggcattcgttgaagtattccctggcgtagaaggtttagttcatatttcacaaatctctcacaagcacattgcaactcctgctgacgttcttaaagaaggacaagacattaaggttaaagttcttgaagtacatccagcagaacaccgtcttgctttgtcaattaaagctttagaagaagctccaaagaacgaaaagaaaacggaagctcctgcagcagactttagtaaagatatgcctgaagaagcaactggattcactcttggagacattattggtaagagcttagacgattcagaaaaataaattataagtgttaggattaataatttaacatttttcccatgctagattatacctatcgactcagttagagaggccttggcggagaatgatagtctgtccaagacctttttaatttgtaaggaaagggggctaattcaatatgagtaacccaaccgtagcaatagttggccgaccaaatgtcggtaaatcaactatttttaatagaattgctggagaacgtatttcaattgttgaagatactccaggtgtaacacgagatcgtatttatactcatagtgaatggttaggacataaatttaatttgatcgatactggtggtatccagattggtgatgaaccattcctagaagaaattaaggatcaagctgaattagctattgatgaagcagatgttattgtatttcttgtgagtgtacgtgagggagttagtgatgctgatgaagctgttgctaaaattctctataaagctgataaacccgtcattttggccgtcaataaagtagataatcccgaattaagacaagatatttatgacttttacagcttaggtttcggagaaccgtttccactttcaggaagtcacggattagggcttggagatttacttgatgaagtaatttctaaattcccagaagataaaaatgaagaagaggacgacgccattcgctttagtttgattggtcgccctaatgttggtaaatcatcattagttaacgccattttaggtgaacaacgggtgattgtctcggatattgctgggacaacacgtgatgcaattgatacgcgtttcactaataatgaagacgaatatgtgatgatagataccgctgggatgcgtaaaaaaggtaaggtatatgaaaataccgaacgctacagtgtgatgcgtgctatgaaagccatcgacaatagtaatgtcgttttagtcgtgctgaacgctgaagaaggcatcagagagcaagataagcgtattgctggatatgcgcatgaagctggccgcggtatcataatcgtggttaataaatgggatacccttaagaaagataaccatagcttatctaactttgaacaggctatccgttcagaatttgcttacttaagttacgctccaatcatttttgtatcagcagttactaaacaacggctctcacagcttccagaattaattaagcgagtagataccaaccatcgtcgtcgtatccagtcttcttccttgaatgacgtgttaatggatgcaattgccgttaatccaactccaagtgataatggaaaacgtttaagggtttattacggcacgcaggttagcactgaaccacctacctttgttgtttttgtaaatgatcctgatttgatgcatttctcatacgaacgcttcttagagaataaaatccgtgaagcgtttgactttgagggaacacccgttcatttgatagaacgtagacgtaaatagctaagattgtattataagaacgctctaaaatatgaaaaagcttgtcacgtcggtgtttgtatgatatatttcaagttgaaataatatcagagtattgtttcaacatttttgatcctttcagaaatgacaaaacatttcgttttgataaataattttcaggaggtgaaatacatggcaaacaaagcagaattagttgataacgttgctaaagtaacaggtttaactaaaaaggatgcaaccgcagcagtagacgctgtatttagctcaattcaagatgacttgaagaagggtgaaaaagttcaattaatcggttttggtactttcgaagtacgtaatcgtgcagctcgtaagggccgtaacccacaaactggtaaagaaatcgagatcgcagcaagtaaagttcctgcattcaagcctggtaaggctttgaaggacgctgttaaataagcggttttctgaactttagtcagcatagctctgttatgctggctttttgtttgcctataaaaatttatggataataatgagtcatattcacaaaaaacattagcagcacttgagtcggggcagattgaagaatcgaaccgtctatacagctgggctcttcgaaaagatgacaatgaaacgctatataatttagctggagaattatttgcattaggatttgatggaaaagcacttcgtatatacgaaaaattgatcgaagaatatcctaatgatgatgaactgttagtcttggcggctgaaattttaattgatcaaggtaaaaatgatgcagctctagaaaatttagatcaaatttcgcctgactctgagttttatgtatcatcattaatggttcaagcagatttatatcaaaccgaagagctgtatgaggtttccgagagaaagttagttgaagcaattaaactagccccagaggagcctgctatccaattagccttaggtgagctgtattatacaacgcaagactactcaaaggctgtaaactactatctggggttaattaaaagtgggatcagcgaaatgtcccaaattaatattgttgaacggttagcggtctcttatgccgcttatggaaagtttgaaaaagcgattgcctactttgaacaaattcatgaagaagatttgacaccagatattttgatgcaagaaggaattacttatcttcagttagatgaaaatgagagagcacaagcaactcttgaaaaagtaattgaattggatccttcttatagcagtgcttacccatatttaattaattcttatcaaaaagatgagcaatgggacaaaggattgattgctgcccaagagggcttggcggtcgatcaatacagtcctgagttgtaccttcaagcagcagaaatggctgagcatgctttagataatgaattggtggaaaaatacctgcgtaaggcaattgaattagcacctgaaaatacagaaggtatgattcgcattaccgatttttataatcgaattggaaaatatgatgaaactttacgtttcgctagtgacgatataactgatgctcaattaaattggaatttagctttagcatattggaagacagatgattttaaaagggctgctagtcactttgatgcagcattgagtgatttaaaagatacaactgcctttttattggatctttaccattttcttagggagagtggacagttggaacacgctgtcgatatcgcacgtaaatacgtaaaattagcaccaaccgatgtcgatatgcaggatgaattagaacagctggaggaacaaggttattaataatttaaatgataaattcaaagtgaaaagttgggcgcctaagttcaataaaaaaatggttgaagtgatgcgtaaaaatcaatttaaatctgataattcagaggattttaatggcttcaaacaaattgattttaaccaacaacaagatttaatgaagaatgaaatctctaaaaaatatgaaattaaagtggttactagttttaatgagcgtacaatttttagcgtaatcggacgtaacgaacataatgaatttttttatgtaattgataaaaatgttcaaaatgaagtttccgttgaaaagctaagagcattattcgataaataatagaaacagattccgtcaagcgcggaatctgttttttaatatagatttttgttcaattagttcttgattatcttaataaacgaacattaataataaattcagttgctaattaaccagtttttaactaaaaagtgaaaaaatatggtatagttatatacacataattgaaggagtgagtaaaaagcatgggaaactcagtatatttagcagggcctttctttagtgatttacaaattgaaagagtacgtaaggttgaagaacttttaaagaaaaattctacaattgattcaaaaagaatttttgtaccaatggataatcaatatgatactaaggaatttggttcatttgaatggcaagtgggagtctttgaaaccgatgtgcgtcaacttcgcaaagccgatattgttgtagcaatcttagattatactaaaaacggtgaagaaatcatttcagatcctggaacagtatttgagatcggtactgcctttgaacatggtaatcccgtagcacttgttcaatttgatgattctgacaaaattaatttgatgcttgctagaagtcacactgctttctttaatggtgaaagtattaaggacttggcaacttatgattttaatttgttaaagccggtatattctgatttaacagtattctaaagctaattaaaaaacatcagttatgtatttaagtttatacataactgatgttttttaattagggatatttcgatttttagcactgggcgaatcgtaggtaaaaccttcaccaatggcttcatggacatcaataatagaagtaaacgcctgaggatcaattcgtccaatgatacgtttagcaacgtttaattcgttaggttcaattacgcaataaaccatttcacgctctgttttagaataggcaccagacatatgaatatagcttgccccgcgctctaactcgtccattaaggcatcagcaatctcttggtttttgctactgacaattagtaaaccatgagcagcataggctcccacttgtgtaagagaaactagacgagaaaatacataagctgctagtagagtatacatcatatgaaggacatcgatgtagcaaagagaaatggttaatacgacggcatctaaagcgaaaagagtatgccccatggcaattccacgccgtttctcgagaatgcgagctacaacgtcggttccaccggttgtaccaccgaaacggtaaacgatcccgctaccaaaaccaccagcgattccggccaggattccggcgataaacatatcatgatgaatatcgagactgatgggtactcgttgccaaacgtataaccaaaatgagagcgcaaacgtcccaaaaattgtgtaaattaaagatctttttcccagaaaacggtaacctatgaaaattaatgggatattaattaaaattgttgaaagtgcaggatcaattcctaataaagctcgtaaaattaaggtgacccctgtaattccaccttcagctagattattagggatattgactacagccaaccctaaaccatacagacaacaacctaaggcaatcatcacaaaatctaaaaatcggattgattcatctttttgcataatagacctcctacgtagaaactgaagtacttgcaaatatcataccatagagcggagcaggcttttcaaaaaaatcatacgctggtagaattattaagacgatgttagagtatgtgcaaaatttttatacttaattcggtaatcagttaaaagatagtacctttacttaaatcggattgatgcgcatactaagttaaagaatttattatttaaggtgttacgagaaagtaattcctttgaaacggatgtggaaatggtgcagatagaaaaaatgccccaagaatttgaggacgcccgtgcagtcctacaaaaaatcgaagatgcaggttttgatgctttttttgttgggggaagtgttcgtgatacattattaaataagccaattcatgatgttgatattgcatcaagcgcataccccgccgaaattaaacatatttttaagaaaactgttgatacaggaatcgaacatggtacggtaatggtgattcatgatggcgaaggttacgaggtcacgacttttagaaccgaaagtggctaccaggattttcgccgtccagatcaggttacttttgtacgctctttaaaagaagatttaatgcgccgtgattttacaattaacgcatttgctttaaaagaagatcgaacggtaattgacatttttgatggtttaagcgatctagaacataaaattattcgtgcggtaggagatccacacgaacgttttcatgaagatgccttaagaatgatgcgagcagtacggtttgcaagccaactagatttcaaaattgaagcaaagacgctgaaggcaatcgaagaaaataatatgcttttaggtaaaatctcagtcgaaagaatcttagttgagtttgaaaaaatgatgttgggtagcaaacccaatcgtggactagaagacatgctaacaactaaattgaatgaatattgtccgggatttaaggaccgttctaaagaactagaccagcttacaaaatatcccttggaacttctagaaaattctgaacaagtttggattatgattgcttggagtttaaaattaactcctcaagaagtaatgcctttcttgaaacaatggaagacatctaacgatttgatcaaaaatgtcagtgcgactttacaagtattaagcatggataaaaatgatcaaaacgaacgtttagcgctgttcaacgcaggtgaagctaatgtagttagcgccgttcgggtagcccaaattctagggatgaatcgtgaggcttggctagatacttaccaaaaccttcaaattaaggatacacatgaaatggcaattactggtaaagagctaattcaaaaaggaataattaagcctggacctcagatgggacaagttttaaaccggttaaaattaatggttattaatgatgaactgaaaaacgagtccttagcgcttttgaatgcagtaaataagttacagaaagatgattaaatatgaaaatactaaaaggtaagaatctaaccaaaacttacggtgaaaagaagctgtttaactcgattaattttgtaatcaatgaacacgatcgagttggactaattggaactaatggatcaggaaaaacgaatttacttaatgccgtttcgaatcttgatcccgctgattcaggaacaattgaaacaccaaacgattaccgtattgcatatcttaaacaaagtgaagaaattagtcagtttgaaacggtacgtgaatttatttacagcggggatcaacatgtatttcaagtaattaaacactacgaagaaatcttagaacaatatactaataatccaacttcatcaacgctatttgaaaaatttactaaacttgaaaatgaaatgaatcaactggatgcttggaatacggaaagtaatattaaaaccattttgacgcaattacacgttgatatgctagatgaatctatccatcatctttcgggtggacaagttaagcgaatcgctttagcacaggcattgttagagccggcagatttattgattttagatgaacctactaaccatttagattttgattcaattgagtggctggaaaaataccttgctgattataaaggtgcattactattggttacccatgatcgatatttcttagatcgagttaccaatcgaatttgggaattaagttacggagacctttttgagtacgtcggtaactatgaaaaatatgttgaacaaaaagcggttcgtgatgagcaaaacgaagctagtaaacaaaaagagtacaaactatataagcaagaacttgaatggatgaaacgcggacccaaagcacgtggaactaaacaacaagcgcgaattaaccattttgaaaagttagaccaagctgtacatgcgcctaaagaggttgatcaagaccttgagattggtctaacacaacaaagattgggcaaaaaagtaattgaaatcaatgacttagatttagaagttggcgaccatcaaattatgaaagatttttctaagttaattcaggcgggtgaccgaatcggaataacaggagccaacggtgcaggtaaatcttcatttttgaatgcgattgcgggagtattgcctattcagggtgggaaaattgaaattggcgaaactgtcaaaattgggtattatacccaaaaaattgaacccataccagaagataaacgggtaattaattacctaaaagaagttggacaagaagtaatcaataaagatggtgaaaaaattagtgtcactagtcttttagaacaattcttatttccaagttttctacatggtagtttaattaaaaagctatctggtggtgaaaaacggcgtctatttttaattaaaattttaatggaacaacctaatgtactattgttagatgaacccactaatgacttggatattgctactttaactgttttagagagttatttaaaaaccttcaaaggtacagtccttaccgtgtcccatgatcggtatttcttagataaagttagtgaccaattactaatatttgatgggaatgctaaagttgaaaaatatacgggctcgatcagtgactatttaaaacaaaacgtagtacaatcaagtaaaattaaaagtactcctaagtcagttgaacaagttgaagctcctaaaaagaaaaaaaggacgtattcagaagaaaaagaatggcagacaattgaaactgaaatcgaaaagttagaacaaaagtccacatctgtggaggaacaaatgagcgaatgtgctgctgattacggaaaattagcagaattgcaaaaagaattaaatgaaatttcggaccaattagaagaaaaaatggcaagatgggaatacttagaaagtttcgaagaataggggaaatttaatatgcttgaagaacaataccttaatttggaaagatatgttttggaaaatgggcatctcaaaggagaccgtacccaaactggtaccctaagtacttttggatatcaaatgcgttttgatttaagtgaaggttttccattactaacgaccaagagagtcccttttggtttgattaagagtgagttactctggtttttaaaaggcgataccaatattagatatttacttcaacataataatcatatttgggatgaatgggcttttaaaaagtgggttgaaagtgatgaatatcagggaccagacatgaccgattttggtcaccgctcactgactgatcctgaattcaatgaactctataaaattgaaaaacaacgttttacagaacaaattttggaagatgatacattttctgctaaatatggtgatcttggaaatgtttacggtagccaatggcgagcatggaagactagtactggtgagactatcgatcaaatttcaaatgttattgatatgattaagaataatcctaactcaagaagaatgattgtttcggcttggaatcctgaagatgtgccaacctcagcattacctccgtgtcattcactatttcaattttatgtggctgatgggaaacttagctgtcaactgtatcaacgcagtggcgatattttcttaggaattcctttcaatattgctagctatgccttgcttacagaattaattgcgaaagcgaccggtttagaagtgggagaatttatccataccatcggtgacgctcacatttattctaatcatctagatcaggttaaagaacaattagaacgtactccacgtccggctcctaaattgaaatttaaacaagtgcatgacagtatctttgactatgaaccaggagatattgtggttgaaggatatgatcctcatccaaccattaaagcgccggtagcagtttaattttaagtcaatttaggaggaattaaatttgatttcaatgatttgggccgaagatttgcgtcatggaattggtaagcagcaatctattccgtggcatattccaggtgatatggctttttttaagaaaaccactagtgggaacaccgtagttatgggtcgtaaaacttttgattcaattggaaaagcgttgcctaaccgaaaaaatattgttttaagtcatcatccaacctcattgccagattctgtagttggcgtgggttcattaagtgaacttcaagggatttttgaaacccatcttaatgaaaaattttatattattggaggaagtcatttatacaatgccttgttatcacaagctgatgaacttctgataactagaatccaaaaagattatcaatgtgaggttttcgcacctgatattacccaaaatgaatttaaattggctagttcagttgaacatgaatcaaccgaaagaaatcctgcatatacttttgaaacatggattagaagttaataaacgttaaaacctcatttattgaggttttttatttatcctccttttcaaaattaaaattatatgatatatttaatctaatttttaatgttaggttatctaacataagtaggagggcatcatggcaaagattaaaaaaactttattgagcatagtttttagcattgtaattttatttgggtggtcagtttttaattcgaataacgtcaatgcggatgagaaagtgtacgagattggaactgatgttacatttccaccgtttgaatttgctaatgatcaaaatcagtacgtagggattgatatggatatcattaggacgattgctaaaaacgaaggttttaaagtgaagattaagccggttggtttcaatgcagcggttcaagcgcttgatgccgggcaattggatggagttattgctggaacaacgattactgatgaacgtaaacagaagatggatttttcggccccatactttaaaactggggtggtgatggctgtaggacaaaactcatccatcaaaaatttccaagatttaaagggcaagcgagttgctatcaaaactggtacagctgctggagactatgctaaaagtattcagaaaaagtatggattcaaaacggttacttttgatgattctaataacgtctataacgacgtgacgactggaaattcagtggcatgttttgaggatcagccggttatgcaatacgctattaaaactggggcaaaacttaagatcgttactaaaccagccaatggcggtgcttatggattttctgttaaaaaaggacataaccaagaactattaaagaaatttgatgcgggtttaaagaaaattaaaagcaatggacagtataaaaagattgtagctaaatatttaggagcttctgctgttgcttcacaaaaagctcataaaacacaaaatacatttattagtttatggaaacaaaatcaaggcgcattacttggtggattagaacaaacggttattttaacagtattatcaattttctttgctaccatttttgggatattcttcggaatgttaggggttgtcccaaataaatttgctaatggagtttcgactactgtaatttatattttccgtggacttcctttgttagttttagccttatttatctatacgggggtgcctaatttgttaggtgaaaaaattccagcatttgttgctggaattattaccttaaccttaaatgaaggagcttatactgccgcttttgtaaaaggtggtattgaagcagtagatggtggacaaatggaagcagcacgttcactgggattaccatatggaaaggcgatgcggagagttattttaccgcaaggattgaaaattatggttccatcctttattaatcaatttattattactttgaaagatacttcgattctttcaattattggaatacttgaattaacacagacaggtaagataattattgcacgtaatctagaaggatttaaaatttggaccatggtagcactaatttacttggtcatcatcacattactaacgtggctttcaaaatgggttgaacggaggatgaagggatgagtacaaaaatagaagtacagaacttaaaaaaatcttacggtagtaacgaggttctgaaaggattagatttgatcgtcaaagataatgaggtggttgttatgattggtccgtcgggttcgggtaaaagtacttttctacgtacgttaaataagttagaagaaccgaccgctggaaaaatcattatcgatgggcatgatttgaacgattcacgggttaatatgaatcaggttcgtgaaaaaattggaatggtatttcaacactttaatctatttaataatttgaccgtaggcgaaaatgtgatgttgtcgccggttgaattagggaagatgagtaaagcggatgccgagcttgaggcacgtgaattgctaaaagaagtgggtttagaagataaatttaatgctaaaccccaatctctttcgggggggcaaaaacagcgagtggccatcgcaagaactctagcgatgaaaccagatatgattttatttgatgaaccgacttcggccctagatcctgaaatggttggagatgtgttagcagtaatgaaaaaactagctaaggcagggatgaccatgattgttgtaacgcatgaaatgggctttgctaaagaagttgctgatcgtgtgatttttatggcggatggtcatatcatggaagaaggaaagccggaagaaatttttggtaaccctcaaaacgaacggacacaagaatttttaaacaaaattttaaacgtttaatcaataaaagggcttgaagtaaaaataatatttaacgaggttaaatattatttttatcaaggctctttttaaatacaaaaattttttgcggaaaagtttgtttatagaacaaaaatttagaatagattgttataattaaaattgtaaatatgtacggggattctataaatgtatatgaaacacgcttcatgtgaatagaactcggaataactatgtaacaaggaaagagtgaaaatatgagtcaaattaaaattgtcacagattcatcatgtggcgttactgatgaagaaattaaaaaatatgatatttcaattgtcccattaagtgtaatgattgatgatacagtttatgtcgaaggtgaaaccattactaatgaagaatttattcataaaatggcatcatctaagtcactaccaaagactagccaaccaccattaggtaaatttgttgaaatgtttgatgaattaggtgaagatggtagccaaatcatcagctttaatatgttagaggcaatcagtggaacggtacatactgccgaacaagctgctcaacttagtaaagcagatgtgactgtgattgatagccaattcacggatcgcgccttagcttttcaagttttagaagcagctaagatggctcaagaaggtgccagcaaagacgaaattatccagcgagcagaatatatccgagatcataccaaactttacttaagcgttgttaacttggaaaacttagttaaaggcggtcgtctaagtaagattggcggaatgctgggaggtttactaaatattaagttattacttgaggtaaaaaatggtaaacttgatgtagccggcaaggttcgcgggatgaaagccatgaagaaactttggtcagatatttatactgaaatgcaaggtagtggcaaaatcaaaggggtaggaatttcacatgtagaagcctttgatatggtagaagatatgaagaaacatgttggtgaatttttcccagttaatgatattgttgtacgagagactgttccaattattgcaactcatacaggtatgggtgcgttttgtatcttatattacagtgaagattaaaaagtagggcttagatcgggactaaccgattttggccctaatttattttacagagagaggcattatgaaagtagtcagagaaattttatttagtatcattggtatttcggttatcacgcttttaattttatgggggttgggattttttaaaggagctaagacaccgtctcaagttgctaacaaagtcgtaccgacaacccagaaaaaagttaaaaatcttaagattttagcattaggtgactctctcactcaaggagttggcgatacaaagaatcaaagtggatatcagcaacgtttagctaagaaaattactaaaactaaacagataaaaaaggcaacgatttacgatgagggggttagtggtgaacgtagtgatcaaatccttaaacgcttcaaaactactactaaaattcaaaaagaggctgctaaaagtgatgtacttattgttacggccgggggaaatgatcttttccagaatctccagaaagatgttactgaatcacctagtcaagttgccgtaaatgttaatcgtattagtcttacttatcaagacaacttagaaaatatttttaaatatgcaagaaagctgaatcccaaaattaaaattgttatggtaggaatttataacccattttacgtatatttcccaaatgtagtggctatcacagatgcgataaatacatttaataccacagcaaaagccactggtgattattttaagcatgctacttttgttgatatcaatgcattatcagtgggtcaatataagacgcttagtcagcagcagcgcttaaagaaacaaagtaccgaggatgatattgcggttgttgaaaagagtcaacttgagaaaagtaaatttgatactaaagaaaaaaataattatttatcggatgcagatcattttcatcccaacgacaagggatatgatatgatggcagataagatctttaaggccatggatcgggcaagaattttcaagtaggtgaagaaatgaataaatatatgtatcatttttggaaatggggatttttagtcctgctctccatttttttagcgggcggtatttatgtaacttttaaagcttctcgtccaattcaacaagttgatgaccaagtagttcgaagtagtaaccactatgatcgaattccaattaaattgaagaaaaatcaaattaatgatttaagcgcagcttatctttctcaatttcaaaaagatgaggattttaattatgggtttaaaattggtcaacgctacgctattttaagcggagaaactgaaattttaggtaaaaagattcaatttgcgttaacgatgattccaaaggttaccaaaagtggtaatatcaaacttaaagcgcatgggctaacagtgggaacgttaaatttatcagctaaaattgttttgaaatatatttcacgtaattatcaacttcctaaatgggtaagtattgatggcgatgaagcacttttacgtttaaatcagatcaaaacaactaataaagtcagcttccaagctaaaacaatcgatattgataaaaacgattttcaattcataattaacgttcctaaagccaataattaaggagaatgctaatgaaaaaatcattttttgaatatttaatgacacaacgcaatccgcaacctaataatgaagttgaagaatttgctaaccaagctttttttgatcaagtatttcctaaacaatcacgcgattttgatgagatcagtaaatatttagagctcaatgcgggctatctacaaagtatgtcaatttttgattcagcgtggcaaagatatttagaaagtgaacagttttaatgaaaaaaataatagaaaaacatccgtatttaactatcgtattttccatgattttaggagttttaattactattgtcagtggtttagtattttttgtagggattttgggtcatactgatggtgagaaaaatgattttaatcgtgtggcgagtgtttataatcaaattaatagtgattattataaaaaagtcgacacttctaaattagctacaggagcaattgatggaatgttgagcactttaaacgacccattttcggactatttaactgatagtgatgctactagtttgaatgatagtgtttcaggagccttcggtggtgttggtattcaagttgtaaagaagaatcaccaaattgaagttatgactaccattgatggtacacctgccaaaaaagcgggtctgaaagccggagatgtgattttagaagtagatggtaagaaattaactaatcaatccctttctaaagccaccaccttaatgcgaggaaaagttgggactaaagtaaaggttaaattgcagcgaggaaatgatacctttgataaggtgctaactcgttctaaaattccagttgagaccgtcacggctaagatgttgaagaataaagtaggttatataactatctcaacagtggctgaaaaaacttctagtgaacttaaacgggcgcttaaacgtttggataaacagggagctaaatcttatattattgatgtccgaaataatccgggtggcttgatgcaggaagctttaaagatgtcttcgatgtttttaaagaatggcaaaactattatgcaagttaaagctcggactggtaaagcagaagtatacaaggcatctaagaagtatgatggtggctataaagttactaaacctactacagttgttattaatggcgaaagcgctagtgcggctgaaatttttgctgcagctttacaccaatcggctaatgttccacttgtaggttccaaaagttatggaaaaggcaccgttcaaaatattacccaatatacagatagtgatgaattaaagttaacgattgcaaaatggctaacgccaaacggtacttggattcatggaaaagggttaaaaccagactatcaggctgattatcctgccatggcatacattacagaatttgatcagaaaaaaacgtactccgtgggagagagcaattcagatattaaaaatattcaaattgccttaaagggattaggttactatgatgataaaatttctaaagagtatactgagaaagttaagcaggcagtggaagcttatcaagaaaagaatcagctggctgttactggaaaagttgatgcgaagacaatgcgttcaatcgaacagaatgtcattaaaactttagctaaaaatgatcctgctctagaaaaagcgcaaaaagttgtgaatgacgaaaaataaattgatttaaggccctacagttgtagggcctttttgattggaatttttgaactaatttaaatatggtaacgttttattcaaactttctaacaaaaagtcagcatttttaacagtttttggttttaatttacggaagatagtagtaagttaaatatatctgttttaatcatagtatgataggagttttgagtaatggaaaaagaaacgcggaaaaattacggggcagcagggttgcttccgctactaatttttttgctactatatgttggatgtttagccgtttttacaattaaaggcgctaaagatccttcttcatacatgccacgccaagtggccattttaattgcattagtatttgcactaatattttttgaacctcgcagtaaattcagtaaaaaaatggacttatacctaaataatgctggaaatgcaggggtgatgaatttagctttaatcgttatgatggccggtggtttctcatccgccgtaaccctttcagggggacaatcctcaattgttaatttaggtgtttccttgattcctagtcaattcttagttccaggtatctttttaatttcagcaattatttcgctttgtattggtacctcaacgggaaccatcgttacgatggcacccgttacattttctctggtagccgctgcccatttgaatgcagggatggcaggagcggctgtaattacaggatcatattttggtgatgggttatctatgattggtggaactactatctcggcagctgctggagttggttcacctatgaaggataaattcttgtggcaaattaaaattgcgacaccagctgcaattttaactattatcgcctatactttgatgagtttaaataatggtggtgcccatcatgttgccgccggaagctataatattattacaattttgccttacctagctgttttagtgttagctgccgtcgggatggatgtggtcattgtactagcgttaggaacggttatggcaagcgcaattggaatttttcttggaaaagcgaatatttttgattgtgcgaaggcaattggaaacggaatggaaagcatgttctggttagctatttttgcaatgatggtcaatgggatggttgcgttaatgcgttattatggtggaattgactggttggtgcatgtctttactaaacgtattcatagtaaagctagttgtgaagctttaattggaatcttgagtttctgtgtaaccggagcaattgtaaataataacatttcagttctaattacttcacccattgctagagaactcggtgatgaatataaagttgatcgtaaagtgttagcaggaattatttccatcttcgcggtaactgcctcaatggtaattccacaagactctgcaatgatgatgactcttcaattagccggtaagagtactaattatctggatttggttcgttatatgttatacccggtaatcttgatggcactaacatttgggattaattatttttcagccaaaaagagcactttaagtaaagctgaatagttaaaaagacgattaggatcgtctttttatttttaaataaaataaatccagaaagagttttatttctcttactattactaatactataaaaattatagtattatgaatgcaaattgaagtttctcaaattttattttaggaggacacatgacaactttttattgttattctaagtgtagtacatgcaagaaagccgaaaaatggttacaagaacatgacgtatcctatggaaaaatcgatctagttgaacaaccaccgactaaagaacaaatgctaaatattttttccaagagtaatcagaaattacgctacttttttaatactagtggaatcgattatcgcaaaatgggacttaaagataaggtagaaatgatgacgaaagaacaggctgcaacattaatgtccaagaatggtaagttaattaaacgtccgttaatggtcgacgatactaaagtcacttgtggatttaatgtaggagtgtatgaagagaattggatttaatataatgaaagacacacggttgtactaaaaataagagttggatttctgtagtttattcagaaattcaactcttattttatatggaatacgattaattaagacatcaaaattctatacaccaactagttcgactataaaatttttgatatggtagcaacacaattgaagacaaagattcatcattacttggtggaaattgggtctctaaagcaactccaccatattggccaatattctgtgcaaatccactattattaaaatggttaccagtataaacaacaattgatggggcagttgtttccacactcaatctacgctgatgatctaagctttctaatactgctgcaatattattatttcggttgagcaagaaaggatgattaagtcctaattgttctcttatttgtgaatctaaagaagtaattgctttaccaagtaatttgggttttcgaaaatcaaatggagtattagtgactgatttttgttcgccggttggaatactatttttgtccagtggtaaataatagtcagcatctaaagttagatattggtctagtatatctttaccgctatttagattaaaatagctatgatttgctggattacataaagtttttttatctgaaatagcttctatttcataaattaatgtattttcgtttgttaacgtgtaagttacataaatgcttaaattcccaggatagttattataattatccggatctaatagatgtaatttaaggatactacagttttcattttctttaatagtaaagccgaacacttgcgtatcgaatccttttgatccaccatgcgcatgattagggccatcatttagttcaaattgtattgtgttatcttcatcttgccagtgaccatgtgcaattctgccaataactctaccaacagtaccaccgagataattccgttctttatcataatattctgggcgttctaaacttaaaatgatgttgtccttttcagatgttcgatcaggtacaaaaaaatgttcaagagttgcaccataatttaaaacatcaacttgaacaccatttttattaaacatagaaatacgatagtaatttttatcatctagtgtttggtatttattaactaaagtatgtttcatttcgaaattcctccaattaataaaagcactcacatgagtacttttatattataaactaaattttttgaacgaatagtgtctgagtatcccttgatgattattagtcaattcagttattttatccatcattgtatgagctttatccacttgatttaatccgaggtatcctaatgcgattaggtaataacagtctatgacattaagtgacttatgatcatctttgaatagcagggcatcaggtaatgatacagcgaagtaatccatttcgaaattgtcgaaaatatgtttttcaccataactaattaatgcgtgaaatttaccatttgcttcttttgtctgacctaattgttcaaaggctaatccttgataaaaaatcgtatctgatggttgatcgttgtaatacatagcactagatggtttttccaatccttgagtagctaatctaagatgctcattagcttgttgagtatcgttaatttgtttgtaagcataacctaggtagaaatcgataacattattgtttgccgtaggaagttttccttcacccagtgagcgtggataaactaaagcacgattaagtttttcaattgcagtcgtataattttcgttagcaatatcttgttttgcaagttcaactaatgcatattcgtattgtgagctgactttaccttcgccaccttcccaagggtggaagatacgatccattaacttttgataagcttctttgtatctaccagtttcgtttaataaagtaactagttgaatgtagctatcgtcgcgttgctcgaccagatccaaatgtttttcaagaaaggctaggcgatccgttaaagaatggttcattttttgatacaaagaatccagttcaaaaacaagccgtgcatttttaggttctaatttaaatgctttttctaaatattctaaggctttcttaggttggttagtcttgttgtagtagacgattgaaagattccggtaagacattgcgtaatcaggatcaagtttgactgatttttcccataaagcctgagctttttgatatatacgacgatcatagtataaattaccaagatagtagggtgctaagccatcttttggattgatattttgaatatattccaaaatgataacgtcgaacagacgatttgggaagatatagtctggagatagactagctccaagttttgctgaagcaagaacttgttcttgtgaatccaatttagagtatatataagattcataataagattttaatggattatcatctttgtaaatgttcaaggccgataatgcatcagcatattgtccagtttcaaggtaaagttgaactaaatctaaaacatcatttaaacgagtatcaatgaaatgttttaacgtatctaagtaatctggattaatttttgaatattcgaataataccgctgaagcactattatcaatttctaaactatcttttaaaaatttttcagcttgatcggatttcatcaaaattaaaatatgagccttgattgctcgagctgttaaatcattatagttaaataatagtgcttgattaataaatttaagagcattgtctaaatcattttcgcgaatctttattttagccattgccacaaaactaactgattttgtatctgcagaccaagttgctttgtaaaaagcatcgtatgcttcagcgtattttccttgtttttcaagacttagtccaagatgataacttgggaaaccagatactgggttggtattatgattgttttgacgttctaaagcacgtctaaagtatttttcactttctacaaataacccttgacggtagagtaggagaccgtacgcatcattgattcgtttatcaaatttatcccgtttaagtccttctagatagtagttttcaggtctgaaactagcgtgacgatattgttcaagatgttgtcctgcattgaatagttcatcgttagttttgatatctttaggattaggaattgctttggcagcatctggaattgcttcgattttttcaggttcaggtgtatattgcaccaaaacattttcgtcttgatcaagtacttttaatgttaattcatgcaattcaaactgatcattttgaatggttgttgtaaacgtttctgtggggcttaatgtagttttttcgttaagtagaacttcgtcttctttttccaaaataacttgtgcatttgaaaatactgatgttgcatatgctgcaattaaaattgtatccccatctttttccaaattaaccgcggcattgatcgtagcatttttaactgctcccacagctttataaggcataaagtattcagtactatgtttctcttcatgaggattgagccaagagaagtcgggctgattatctgtgaaagtaccaaccatcaattcgatgtatggtccatcattatcggttaactgatgatcccaagattgtccaaaatcaccatgtccccaagtccattgctttttaccaggtgaagtatgatggtcagccacatgaagaagaccagcttctttctggtgatcgtaattacctaaaaagtcgtattttgatttggctgccatataagaagtaggtacaggtacatttttgtaacgagaaatgtcaacgccttctgagtaatcaactttataatattcaccagttgcgattggaaaatcagatactgcacgttttccgtgatcaaaaacagcattaacatctggtggaaagattgattgagtgttttcatttacaggtactgcgggattagcccaccacaagaaagtctgtggtaaatcagttggatttgaaaaagtttcatcaactttcaaatatgccttatcaggatacatagtgaaaccaactaaaatttttgtgccattcatttgatctatatcactcatccagattgttttagaaccgtccgagttaatcttagtgtaataattcactggagaaaaagtatctggtcggtgatgttgtggccaattgaattcgattcctccggaaatccatggcccagccagaccaacaagtgctggcttaataacttgattataatagacaaagtcgtaattattagttttatctaacattcgataaattcgtccacctaattcgggtaggaaagtaacctggatatacttattttctaagataacagctttatatgtcttgtcatgtttttcatcaaagacacgttcggttaccggaaatggataagtcttaccactacttccttgatatactcgatcttctaaaaacatcggatttttttctggcttagcgattccataggttggaatcgttaagtctgttttttttagaataactggttcatttaacgtaatatcagtagtcatataaaacagctcctttcaaatttacgttttaagggtataatagaaaacgctttcttcaaatgtacaaaatgtgctaaatgatggattttaggcaactgttatttgtttaaatttttatcatatgataatatcgagaccaattaatgaagagattttataaaggaggggcttatgaaaaaattacacgggtttgagaatgaatatttatctgtattaccgccagtgattttgaataattttaatttttcaaaagtcataaagctgttatatataaccgatctcggtttttatcctaaagcaagatatcattttgttcaccgtgatcgtggtactgaagaatggatattaattttttgtacacatggcaaaggagctgtaaaatctgcgactgaggaatggctaatcgaaagtggatcaattgttttgttacctcctggtaaggaacatacatactacgcttttgatgatgatccttgggacatattttgggcgcattttaacggagattctgtaaatgaatatattccacaagaagctttgcaaggaaacggtttcttagtgattaataaaacaagtactgaagatatgcaaatgcttatgtcacaattttggcaaatgattcaagcgttatcagcaggattttcatatcaatcagttttttactcatcacaggtattaggtgcaactttagcgtatgtatcgttgcagtcagttttgccgcatgattcttatacaatgggtaacgaatatataaccaaagcagttaaatatggacaaaagatcagctcctaaaagatgggtttgtggtaaacaccattttaaaggaagctgatcttttttgtccgaacagcgttcggattaattttacaatctaccccttaactacagtatagagaaattagtggttaattgataatgatatgcgtgggcgttttaaaaaatagttggcactagtccgccatcaacccgcaatgcttcaccagaaaatgacgatgcatctggactagcaacaaaggctgcgaaacgaccaatttcttctggacgaattaaacgttgaatttgagagcgggaacgatgttttttcataaagtccgcttcccattctgatttaggtaaatcactatcagcgtacatatcttctagcatttgctgtaccccttcagttaatgtcgaacctggcattatggtattaaccgtcacatgtgtagcaaccgttagtttcgataagctcttagctaacgacaaattcatggtcttagtcatgctgtattgaggcatttctcccgatggcatcacggcttcttcgctagcaataaaaatgatccttccaaaatcctgatctaacattttaggcaagtaaaatttagctaaagcattcccagctaatacgttaatctggaaaaatttattccatgtagcatcatcaatatcggcatattccatcggttgaaagattcccatgttattgattaagatatcaaccttgggatactgctcaaagaggtgtgttcgactagcttcattggcaatatcagcagctgcaccttgcggattagtatttggaaattgggttttaatatcagccacgacttgatcaacctcatcttgattccgtccgttaatgattacgtcagccccctcacgggctaattctgtagcaatggctttcccaatccctttagttgagccggtaatcaaagctaatttatgtgttaaatgtaaatccatagtttacctccttctaaaatctaaaaatcaaattcatctgggttaggtccgacgcgcaagttttcattcaaagcattaatttggtccatatcttccggtgctaattcgaaatcaaaaatctgcgcgttacttagcattcgttcggcacggactgatttaactactaacaaaatattttgttgaacatcccaccgtaggacaatctgagcgacagacttattgtacttttgggcaatcttagctaacacagcgttatctaagatttttccttgcatcaaaggtgaccaagcttggaccttgatatcatgtttagctgcatattctcgcatctcgagctgacttaattgcggatgggtttcgatttgattaattaccggtgtaatttcagcaaattccgctagagcttggagatggtgaatttggaaattacttacaccaatcgctttaatctttccttgtttatataaagtttctagtgcacgccatgcatcttgaaatgcattatctcctggccaatgaattagataaagatccaaataatctaaacctaacttctttagactgctctcaaaggctgctatcgtttcatcgtacgataagtggtcattccaaaccttagaagtgacaaataaatcggctcgcttcaaaccagttgccgccaacccggctttaatgcctgctccagttcccgcttcatttccgtaaatctgtgctgtgtcgattaaacggtaaccatttttaatttcagatgccactacttgagccgtatctgcatctggaatttgaaaaactcccagacctagccctgggattgcagttccattatttaacattatgcgatcgtttaaagaattaatcatttttttctcctttgaagttcgattataattttaactataactaaactgtttctattcagctagtacccactttattgtgctatacataccaaaaagtatgctttgtgttatactggcaaaaaaggagcgaaactttatgacaaaacgaatttataatattggtgtggaagcgacaatggatgttatcggcggtaaatggaagcccatcatcctatgtaacctccgccatggacaacaacgtcctagtgaattacggcgtaatatccaaggaattagtcaaaaaatgttaacccaacaacttcgggagttggaacaggataacattgtagttcgtaaatcatacaacaccgttccacctaaagtggaatattacctaagcgattatggaagatcgcttgaaaaattgctcgacacattgtgtagttggggcgaaatgcacgttagcactttacaagctaaaggtgaagacgtagcactcgtaaaagtcgattaataaggggtgctaaattatcggtactgctctgataattagcgctttttttatttcactgataatttattaaataaaaaattatctcgtaacattaattggtatattccattatattttttagtaaaaataattaaaatgtcatcatatttatcatttttatgtcattttttagttatatatcatttgtaagggtttacattaatgatttttatcactatactgtttttgttaccaaaatataaaggaggagctttttcatgaataaatttatggactggttacaaaatgtcctaatgccaccacttgctaaagcggggaataataaatatctggtttccattcgtaacggactagtattaaccctaccggctgtgattagtggttcaattttcttaattattgctaatattccaatccctgcctggtcgaattttatgaaaccatacatggacgccatgggagttgcagttaatggttctttcggaatcatttcattgttagctgccatcggaattggttacgaattagctaaagctttggagttagacgctatcaatggcgctggactttccacgatggcttttatcgtggcttcattcaacagtaaatacaccctcgatactgtaaacttcgcttcgtctggtttatttacagcgattgtttgttcatttatttctgtttcgattttgaacttattcgttaaaaaagactgggttattaaactgccaaagggtgttccagctgctgttagccaatcatttgcttcattaacgcctggttttgtagttttgctattattctggggtcttcgagttccccttcattttgatattaatctatttgttcaaagcatcttccatcccctattatttgctatgaacagtctaccaggaattatgttctacacgttattggttagtatcttatgggtagctggtattcatggtgatatgacgttacaaggaatttcagatccaattttccttcagtttctaacagctaatggtttagcttacgcgcatcatcaaaccattccatacttaacctctcttggattttctagtttatttgttaatgttggtggaaccggtgcaaccattatgcttgtattttggatgctttcatctaagagcaaggcttatcgagaacttggtaaagttgcctttccaagtgccttatttgaaattaatgaacccgtaatttttggtttccctgtggttatgaacccaatcactttgattccattcatcatcgttcctcaaattttaacggtcctaacctacattttgatgagcgtccatttagttcgcccagccgtaatgatggttccttggaccatgccaccaattatcggacctttaatggcaactggttgggattggcgtgcgggagtttggtcggcaattgaactagtcattgccggagcaatctactatcccttcttcaaggtggctgaaaaacaaatggttgcccaagaagcaagtgaggcttaaactttcatgaaaatcaaaattctattaaaatatagtgtagtaggtgccatcttgattgcagctcttgctattgcgatgacccaacttcatttaacttcaaccctaactaatcgagtagttgaaatcgctggtataatagtatttgtagtactaggagcacttctaaaacgaaaagcagttaataaaaattaatgaggcccaacgacatggataaattagaacagttaacccaaaaagatttggaagaattttatcaactatacctgtacgcctttacgaactcagattcaaaaggacgacgagctttctttgatcatcgctacaaccatgctttaaaatatggaatcaaacataacggaaaactcggaagcgggatgttaagtattccatttcacgttaactttcatggtgtgaaatacaagatgaatgggattggcgatgtcatgagttaccccgaatacggcggtaacggagcaattacccaactcatgcaacaagcttttaacgatatgttagaagacaacgttgctctctcatatcttgctccattttcatacgatttctatcgtcgttttgggtatgaagaagtttttgatcgtaccatctatcgggttaaaaacaccgacttaccgagagtaaagattgacaaaaagattggtagtattgaacgtttaaccttagccgaagctattccatttattaaggaagtttatgctaataatcccaacagccacaatgctggtttaattcgtgaggattggtggtgggattatctcgttctcaagcatcctcattggcaggtgggcgtctacttctctgaagaccatttatctgcggggtacgttatctacgaggggcttgatactaccttctcgattcaagaaatcatgtttactaattgggaaagtttccaatatctaagtcgctttatctgccaacatgagtcgatgttttcaactttcgaatacgccagtggtgaccctttaggccatcctgacattctaaagaatccatccaatgttgaagttcagattaagccttacatgatggctcgcattattacccttgagaccttcattaatcactatccattcttaaagaaaatcaaaagcactcgtgttgcagttactgataaaatgcttccggctaataacggaatttggcgtcttttaatcaatgccaatggcactagctttgagaaaattagtgataacgaaaataatatggctgacattcgtatatctattcaagaactcactaaagttttattaggttatcgttccttaaatgaacttaatcgaattggagcgattcgcggtagctatgaggctatcacaaatttagacgctaccttacgtaaagaaccacctatgctatgggattacttttaaatcaaactttaaaaaggcaaaccaacgtcagttgatttgcctttttatcatttttcagtatagatagaacggagattatatctaatatatttttcaaaaaagtttactaaatacgtcgtcagctgctttagcaatggaaaagcgcctaatccgattgcacaaagcatcaatgtcagcgggatttgatacaagtttaaactaacaggagttacccatcccatcatatggacaaccagccattcacctactaataaggctggagacactataaagccgatgatggagatccaaagaccacataagattccggcaactgccaagacaactcccatggtgacaataacgttgaaccagaaaaaaccaaataatgctaaccaattaatttttttcattttatgacctgcttcctctttcgaattagagggatgcattgcaaccaattggtcgagcgaaacattatacaactgcgcaagatcttttaaagcatatatatttggcatcgtttttccttgttcccaacgtgaaatcgtttgtctggtaacatacatttgtgtcgccacttcttgttgagtaagatctcgtgctcgccgtattttttgtaacgttgttccgattgacatccaaccaccccttctagttctactctgccacagtccttttaaaagccaagcaacaaacctgttacatggcttaaaaatcaagttttattaacttcattttattccttttgaagttaaatttgggtaaaaaaataatgatagaaaaaatttctatcatcatttttattacttataacgttgattcttttaaaacaccatcgttaatttcgaacatttgatcagcatacgattttaagcgcatatcatgggtaacaattactaccgctttatgacgatcgtgtgctagatccgcaaataaacgaccaacttctttaacccgttcactatccaaagccgctgttggctcatcagctaagataatggcaggatcgggatacaaggcccgagcaatcgccactcgttgctgctgaccacctgataactctgttggaaatttatcaactaaatcttcgattcctagttgttgcaataatttatctaaactttctttagataaattaccttctttttttactttatcgaccaatttgaattgatctttaaccgttagaaatggtaataaatggtaattttgtagaatgaaaccaatgttattaagtcttaatttttcaaggtctttacgggaactagtttgataatcttgtccattcactttaacttgtccagtagttggagtccgcaacccgcctccaatggttaagaatgtacttttcccagaaccactgggaccaataatcaagctcaatgtcccagcttcagccttaaaattaacgtcatgtaatacgtgaactttagcaatcccttttccataaatttggttgatattattcatttcaattgcagtcatcatttatcctccaattacacttactgggtctagttttagtacacttcgtattggtaacaagccccctaacagccctgtgattaccaatcctacggctactgatgcaaggattggaatatcaaatgccattggaactgcagcaggtaaaatagcagctgtagcagctgttagagccgttccaataatggttccactaatcaccaaaattagtgattgagctaacgtgctccaaactaacacgctacttggaattccttgagctcgtaaaacggcataatttggaagtttttgaatggtaaggatgtataggaagatggcaatgacgattaaagaaatgaccattaaaaatcctatcatcagtgagaaggtcatattctgagctgagtaacctggaagcttctcaataaaggatttaactttgtaagattttagcggttccttaacctttaaattcttagttttagaaacaattgcactagccttagtctgtggtgtagcatgcttgagcgcttgccaatcggataatttcccataaattactggtgcaatatttaacttcgcattcttagtaaaaccgacaattttaaatgctttatctgcatcattcaattcgattttatcgccaagtcggtaaccactttgttcgaatttttcatctaccactacttcgtggtcttgcttcactttatgcccactagtaagtttcaagtctttagcaatgaattgatcattatcaattccaacaaaactagaagaaatcttagcctgcttccccttttggtctttagctactaccgcaacttgtccaatcaaggcatcttttttagttaatttttggtcttttacttgttgatcagtcaccaacgactgacttaaattaacgttggcatcttggtttaaaactactgtttctactttccaggagttaatggcatccgtattttgatgagctaaacctagtgctaaactagttaaaataaaaattaaataactaatcaaaacaatcattccgataattagactgtatcgtaatttttcttttttgatttcttttaaagctagaaacataattattcctccagaatttttaggactttttctaattggtgtaatcgggcatcggtagtccctggttcaatcagtgcgcaacgaattgtatcgtggattagcgtcatttccgcccactgtatctcagcatgcggttcaagtggtgcaactaatctggtcacataaacttcgttgtagtgatagtgcatttgaaatagctcgtaatacttactattctgagtattcttaataaattggcgagcttcatcgaccaaattttcgccacgcctttcattttgccgaattgcctggtggatatcctgaattgcgatttgatataaataacggtaagcatctggtacatctttaaagtaattataaaatgcaccacgtgaaattccggcacccttcacgatgcgagcaacttgtgcttctgtaaccggatgatgcgtgaattccaataatagcgattcttcgatggccgttcttttatccggtttcaacttctttaaaacatctgaagccactcctccacctccttaaaataaaaatgacaccgtgtcaacaatgctagaatagcacacagtgacaccgtgtcaaaattatttgcttatttttttaagttaacggtctgcgtggcaattttctggacaaactcccgatcatgttccaccactaataaggtgggcttgaacttcaaaactaaattttgaatttgttcccgtgtaattacatctaggtagtttaggggttcatcccaaatatatagattggcttcttcacacagcgaccgagctaaggcaacttttctcttctgtcccatactcatctgctcaattcgataatcaaacatcgtacgttcaaaacccagttttctcagcattgccagcaagccctgaacttcaacttccttttcggcagcaaactgttctagtgtgccttggagctggtcaaaatcctgtggtaaatatgatattcgtaaattttcgcgtatttttagattacctttagcaattagttcgttttgccctaacattgccttaattaaggttgattttccagaaccattttcgccttgaataaccatccgctcattcttctttagttcaagattaagcggctgatttaatagttttccagctcgttgtaaaactaaactatccgcttctagtaaagcattgttttggggtccgagatacggttgataattcaattgaagttcatcctgaatttcaatattctttagtaattgtttcttatctgttaattttttctcagcccgatcccgaatattcaaggctttgctcatcactttagctgctttatgacctacaaaacccttatccggagcaccagcttttttacgttctgttgctcgggaccactcttgcttttggcgcgtggcctgttctaatttttttatatcttttttcatcgtggcattcaaactgatttcacgttcatccgcattggcacgttcaactgcccaagtttcataattccccttaaagctgctaatttgagcacgatcaattgaaataacatgatcaataacttgatttaaaaagtaacgatcatgactaaccacaatgtatccttgtttttgttttaaatatttagctaaaaggtcgcgcccagctgcatccaaatgattcgtcggttcgtcaatcaattgaaatgaattttgatctgcaaacatggctgctaaaagggctttggtttgttgccccggacttagtgatgcataagtctgttctaaaatttcttcagcaagtccaatctggtctagttcacgctcaatctcccagaaatcagagtaatcgcgatcagtaattttcatcaggaccattcgcaccgaatcctgtggttcagtaattttagctggaaaataattgaacttcaggttggtttccactttcccctcatattcaacctgattctgcaaaatcttcatcagcgtcgttttaccacgcccatttctgccaatcagacctaatttccagctcgcatcgatttccaacgctacttggtcaaaaaacggttttatttggttatcgtagctaaagcttacgttttttaattgtattattcccatttatgtctcctctctttcgaggagtagttcgttttaaggcataaaaaagcaccaggtgtgcaggcctgatgcaatacaaagtgcataataccaataaaaatttatttttggtcggcacatcgaatgtatcaaaaactacaaactactcccgaaaataaagaaatcgtcattccaatatttccaaaattagtctgcaatcttcaatcccatcgacatcccttcctaataaactagccttagcttaacaatgaatgcgttttttttcaagaaatatccctctttgtaatctgatattaaaataagacccaagttagtgtaacgcttatttatttagtcattaataatattccaaaaatgattagcgccccatacacaagtttaatggctctttcgggagcaattcgcgctactagccaattaccaaaaggtaccactactagcaagcctggaataaccatagctaatacttccaacgcatctatcgaccaaaaacccgctgctagatggcttgcaacgaccaagattcccacacataaaaagtgagcttggagaatggcccgtaactgttgggctgaccattttttcaaagttccatatacggccactggcacaccatggctgttgtatgcactacctagcacgcctgaaataattccggtcaaataatcatagccttgtgcttgtaaatgggggcgcccgactcggcctgaaagactatgccacaagctataaatcccgtaagcaattaaaaaaattcctaagccatgtaacacaattgcggcaggaactttcttaatgactaaaattcctagaggtactccaattagtgaacctgtcactaatcgacgaaccgctttaaaatcaatatgatgccactcacgaatcgtggctggtaaagcaaccagtaagcccaccgctccgattaatgcggtgctggtctgtagatcaaacccaattaatgccaataatggcatcgaaactagagcttccccaaatccgaaaactgtacgtgtcagtgctccaacccatgctattagcaatacccctaaaataatcatttcaattcctcatttcagtcattacaagacttaattgtatatggaaaaagcaaaatcgacaacggtgtaaactaatttctagacgtcgataaaattaagatttccattacccaattggtgttctttgaccattccaccttaaaattgaagttcattttttgcttcaagctccattgctgaacttcaatttaatcaaaaaagatgcggatgcgttataatggtggacacaaggagttgaatattttgcatatattaacagttatcttagttgcactcgtagccattgagcatattggcatcatgggcattgaattattgggttctagtgcatttcttgccaaaacctttgaaattcccttagtggaagttcaacgccctcatttacgaacggcgttagccaatcaaggtctttataacggcttcgtggccttagccctcttcttggcactctttattccaacagggactattatgaagatgatgctcatctttttcctagcaagcatttttatcttagcagcatacggtgctctcaccgtcgccaaaaagattcttttagtccaaggtttacctgccttgattactttgattttggtattatttattttctaaataaaaaaggatagccttagaggctatccttttttattagattcgtataaaattgctttccgtttaatgccttcaataatgaacgcgataactactaaaacaattaaaattgtaaatagtcctaaactataaaggaaaacaaatgaggttgattcaattatcatactaccaactaaggggccgattgcccggccagccgaaggaaaagcacttgctagaccttgatattttcccttttggtcataaggtgaaagactgttaacgattgctggaatcgatggaaaggcaattgcttctccaatggttaaaacaatcatggcgattacaaagtggtaatattcgtgtgctacggctagaattccaaaagatagggtaaaaaatgcaatccccaaatagacttgatgatatggatccttcagtaaacgtccccctttggagctgagaagcccttgaacgattaaaatgaataatccattgaccgtccataaaaagctgtataaacgaagcggaatgtgcaattttagcatatagatcgaaaccgtactattccattgttgatagaaaacccacataattaccaaactaatgaaaaatgccatgataattgtcaagttaacttttggcattttagttttctcatgatcgtcttcttgtactacttgagcagggcgatcttcttgtggaattcggtaagtaaagaacgctacaatgaaaaataccgtaaacataatggttgctatggtgaaaagcggcgtgacactgtgcttaaataaaactcccacaatagcagtgcctagcatgacccctaaattttggacgaaatatagcatgttaaaaacatatcggccatctttactcttaattgatgttcccattgagttatttaaggcaacaatccaacctgttccaaatccgattagtaccaatacaatcggatatactggccagccgttgaagaaaatcaacgtaaagaacgaaatccaggtaaatgcaactccacctaagattaaataatagctatcatacttgtcataaaggcgcccggcaacaaaagatcctaaaatactagcaactgagtttaaaaataaaacaatccctgccattactaatgaatggcctagttcttggttcatataaattgttgttagtggccacactgaactcatcgcaatactatcaatcaaaactcctaataataaccactttaattttaattcgcgcataattcctcccctaatttttataataaaagactgatttagactaaaaagtcttaaaccagtcttgaaaataatgaatctcatttttcaaatacctaatgcgctcccgcttcaggcatataagctaacgaagaaaatttattgtacgacttaataaacaacagatttaccgtaccacgagccccactacggtttttttcaatgataacttcaacgggaccaacattttgatcttcttcatcccgtggatcctggtctcgatctgcgtcttcattgccatcttcccgttcataataatcatcacggtataggaacgctacaatatccgcatcctgttcaattgaaccagattcacggatatcagacattaccgggcgcttatcttgacgttgttccactccacgtgaaagctgtgaaagcgcaatgaccggtacgcctagttccttggcgagttttttaagttgtcgtgaaatagctgaaacttcttgctgacgattttctccagatccttcaattagctgcaagtaatctaccacaactaagccaaggtttccttgctctttagctagacgacgacattttgcacgaatctccgacattttaattcccggattatcatcgatatagatacttgccttagctaaagaacccatcgccaccactaaattttgccattcttcttcatttagctgaccggttcttaaatgatttgcatcaatacttccttccgcacataacatacgatttaccagctgttcagctcccatttccaaactgaaaatagccactgatttatcagtcttagtacccacattttgcgcaatatttaacgcaaacgcagtcttaccgacagctggacgcgctgcaagaataattaattcatctgcatgtaatccagtagtaattttatctaactctttaaatccggttggtaatccggtaatctcatcgtcattttgataaagacgatcaatttcttccattgaagttgttaaaacatctgcaattggcttaaaacccgtttgattacggttttcagcaacatccatgatttcacgttcagcttcgtccaagatattagccacatcgtcatcttgggtgtaaccttttgtagcaatcgctgttgctgtcttaattaattttcgtaataaagatttttcttgaacaatcttagcgtagtagccgacattggctgcggttggaactgatcctgccaattcagcaatgtaagtaattccaccggcatcttcgatttgattatgttcttcaagtgcattgttgactgtcaatgcgtcaatggcttcatccgcatcgttcaaatcaaccatcactttaaaaataacttgatgagcgtgtttataaaaatcttccgccgtgacgtattccatcgcgtcaatcaatgcatctgaacttaagaaaacagctcccaaaaccgccttttcggcctcaatgttttgcggaggcgtttgattttctaaaataccgttgtccatgttactctcccgtacgaattagactctgagttgagagccttagtaatcctattgctcagctacatgcacccgaatcgttgctgttaccttttggtgtaacttaacgggaacgtttgtgtagcccatgctacggatggggttgctcaactcaattttgcgtttatcaattttaatcttatattgtttttcaagggccgtagcgatttgtttgttcggaattgaaccaaatagacggccatcttttccagccttggctttgatttcaaccacggtcttatcatcttctaaaaccgttttaagcttttcagcatcagccaaaatttcagcttcatgcttagcttcggcctttttttgaccctttaattcgcttaccgcagcgcttgtagcagctttagctttaccatttttaattaagaaattttgggcgtaaccatcggaaacgttcttaacttcgccacgtttccccttacctttgacatcttccaaaaaaattactttcatcagaatcactcctcatctttttgattttcttgtaaaatttcaaccaattgttgctcggcttcctcaacactcacatcttctatctgagttgctgccattgctaaatgaccgcctccaccaagttcttccataataacctggacgttttccgttcctgcacttcgcgccgaaattcccacagcatggtctccacgacgtgtgatcacaaatgaggcttctacgcccgaaatattcagtagtgaatcggctgcctgagccgcaatcactggatcatacattcgatcatcttcaccggtacaaattgcatatttatcttcaataaactgcattgtatcaattaaatggtttcgttgcatataactatcaacattctcttttaagaggtaacgaatcgtcttctcgttagctcccactgaacgaagataactggctgcatcaaaagttcttgtccccgtacgttccgtgaacgatttagtatccacttcaatccctgccaaaatagcagtggcctcaatcggttgaattggttcaccatcatgggactgatattcaaacatttccgtaatcaactcacccgtcgatgatgcatatggttcaatgtaaaccaacacgggattttctggaaactccgttccacggcgatgatgatcaatgataatcacccgattactaagcttatcaaatagctcctcagatgtcgttatggaacgtttagaatgatcaaccatcactaacaaactttggctattagcgagctctacggcttgatctgcactaataatggactctttaaggtcttcatgctcatccattttttcaatcaaacgcgctacatccgaatgcacgccttcttggtctaagacaatccaacactcttttttattcatttgcgcaattcgccgaatcccgagcgctgaacccactgaatctaagtccgcatgggagtgccccattacaaagacttgatctgcttggttcattaattcttgaacggcttgtccaatcatccgcgctcgaacgcgagtccgtttttccatcggattagttttaccgccgtagaaacgagcttgttcatcttcagctttgacgacaacttggtcaccaccacgtcctagcgctaaatccagattactttgcgaaacatcggcaagcttattaagattatcatccccgtaagcaatcccgatacttaatgtaactggagagttttgtttagaagttgcttctcggatagtatccaagagcttaaaactatccttttccaccttagctaacgtttcattgtacatgatgacaaagaaatgatcatcatcaacgcgccttaaatacatcccaaacgattgcgcccaactagaaatctggttggtaacaaagttgtttaaattagaaacttccgaatcagccatcgactgtgtaatttcatcatagttatcaataaaaatttgaccaattaccacttgacggtcatcgaattgctcttccattttcgcgtatttagtcgaatctaggaagtaaactacgcgatcatccttttgaattgaaatatcaaaaacgtgatcgttccatttcacacggctaactttctcgtcatcttgatgttcttcaataatcttcgccaaatcttcatcgatttcatccaatggatgtcccaaaagtttttgtccttcaaaataactttggaaattagggttaacccattccactcgatgctgttcactataaattaaaattccaattggcatagacaacgtagcgtcttcttcagcctgatcaattcgaaacgacaattcagaaatatatttatcagtctcatcactcagtaaacgcaacgtgcgaacactaaaaatgccagtaacaataaccaatactagcatgatgatgccgattaataagttaatataaaaagctaatcccagcccaatcaacgacagcaaaataataactgctgttaaaatcccgacccgcgggttacggataaatgcaggtagatgatctactaatttcatagcacttctcctaaaaaattgtgtctaactatctctgattttaccatacttataaccaataattaaaatcgtttgttggaaggttattctaataaaaatagagccataattgaccaactatgatccatcaccgccctaattttatttaaacaaaaagtaccattcaagcctcggcctgaatggtactttatatagctaaagattagtcttcagcaacgaatggaagcaagcccatgatccgtgcacgcttgattgcaatagtcaaacgacgttggttcttagcacttgtaccactgacacgacgaggtaagatcttaccacgttctgaaatgaatcgttttaacaattctgtgtctttgtaatcgatgtattcaatatggtttgcagcaatgtagtcgactttacgacgacgacggccaccacgtttttgaaatgccataatgattgccctcctctattattttagaatggtaaatcatcgtcagaaatatcaattgactgaccgccattagcaaatgggtcattagggttcgaattgttaggttgttgtgcaccactattattcgattgtcctccgtcaaatggatttccggatgatgttggttgttgtgaaggggcagattgattattgccaaaattattttctccaccctgacgacgttcagaagatgaacgtgattcaagaagagagaagttttcggctacaacctcggtaacataaactcgttggccttgttggttttcataagaacgggtttgaatccgtccgtcgataccaactaatgaacccttccgagtgaagttagcaaagttttctgcagctttacgccacataacacaattaataaagtcagcttcgcgttcaccttgtgaattagtaaactgacgattaacagcaactgtaaaagttactactgcagctccactacctgtatatcgtagttcagggtcccttgttaggcgtccgacaagcactgttcggttaatcataatatccgctccttcctagtttttagttgttattattaacgtacaacgatcatgtgacgaagaattccgtcagcaatcttagatagacgatcaaattcgttcaaagcttcgtcgtcgctagccttaacgttaacgatatgataaataccgtcgttaaaaccaccgatttcgtatgctagacggcgttttgaccagtcttttgaatcaacaatttcagcaccattgtctgtcaaaatcttgtcaaaacggtcaactaaagctgtcttagctgcatcgtcaagatttggagcgatgatgtatgtgatttcgtagtttttcattgatttacacctcctcatggacttatggccttctatcacaacgtagaaagcaaggagagtttgccaaaaaagctggcaactcacaaataagtattataccatccatttttagtggacgcaataacaaaaaatcctaattaacgatatacaaatgataaatacaccaaaattttctaattcattttattaattaaaaaagctgattaaaaagtgaaaaatcacttcaatcagctttttaattaaatctattcttcagaactttcttcaacagttacactttcagtttctgctgcttcagttgctggagtttgagtctggttttcatcatcaactggtgcttcatcaacaattgccattgtagcaactttagaattttcatccgtcttgattacgtgaacccctaaggtcgcccgacctgtagttgaaacattattaacgtcgaaacgaatcataaccccacgatccgtaatcaacataacgtcttccgttccttccaccgttactaatccagctaatggaccattcttttcggtgatattcgcagtcttaatccctttaccgccgcggcctttaattgggtattcactagccggagtttgttttccataacccttttcagtaataaccaagaccttgctttcaggtttcaagattgctgaaccgacgacataatcttcatctcgtaaacgaattccgcgaaccccagtagcagaacgtcccattgaacgcacatctgcttctttaaagcttaccgcgtatccgttatgcgttccgataataatgttttgctcgccatcggtaataaccacgttaattacttcatcattttccttcaagctaatggccttaagcccattgctgcggatatttaggaattcagcaaccggtgttcgttttgtcacaccgtttaacgttgtaaaaaagaggtaacgattttcattatcttcatcaccgttatcacgtccaatattgattacagcctgaatattttctccgctactaattccaagcaagttaattactggaattcccttagcggttcggctatattcagggatttcgtaacctttcatccggtaaaccttaccggcattggtgaagaataagagtacatcatgggttgaagttgaaaccagatgttcgataaagtcgtcatcatgaacacccatcccttggattcctcgaccaccgcgattttgcgtcttaaattcagacgtagccattcgcttaatgtagccattatgggttaaagtaaccatgacatcttcttcttcgattaagtcttcatcttcaaggctaagaacttcaccgaccatcaattctgtccgacgttcatccccaaagcgctcttgaatttcaagtaactctttataaatgatttcgttaattcgttcacggtgagctaaaatatcacggtaatccgtaattgctgccatgaccttgttgtactcgtcttcaaccttttcacgttctagtcctgtcaaacgcaccaagcgcatatccaagattgcttgagcttgcttacttgataatgaatagttattcatcaatttatctttagcaacctcagccgtttgtgaattacgaataatcgcaataatttcatcgatgtggtccaaagcaatccgcaaaccttctaagatgtgcgcccttgcttcagccttcttcaaatcaaattcagtccgtcgacgaataacttcttcttgatgaacaagatagtgttgcaaaatttcctttaggcctaatactttaggagcaccattaacgatggccaacatattaaatccaaaggtcgtttgcattaatgtcatcttgtaaagattattcaaaactatagatgcactaacatcacgacgaacatcaatgacaactcgaagtccatcacgatcggattcatcatttacatcagtaatcccttcaattcgtttatcacgagctaattcagcaatgcgttcgatcaatttagccttattgaccatgtatggtaattctgtagccacaatgcgttcgcgaccatttttttcagtctcaatatcaactttcgcccgtaaaataatcgtaccgtgtccagtctcatatgccttacggattcccgatttacccatcacaattccaccggttgggaagtctggcccagggacagcttccatcaagtcggcggttgttgcatcttcgttattcatcaaaatatggatagcgctgatgacttctgacaaattatgtggtggaatattcgtcgtcatccccacggcaatcccagttgctccgttaactaataagtttgggaaacgtgctggtaaaattgatggttcgcgttccgttccatcatagttttcttggaaatccacggtatttttattgatatcacgtagcatttccaatgtaattttactcattcgagcttcggtataacgcatagcagcagcgccatccccatcgacagatccaaagttaccatgtccatcaacaagcatgtaacggtaactaaagtcttgggccatccggaccattgattcataaattgcagagtcaccatgaggatgatacttacccataacatccccaacgattctggctgacttcttatatggcttttcaggtgtaactcctaactcattcatcccgtataaaatacgacgatggacgggttttagtccatcccgaacgtcaggtaaagcacgcgcaacaataacactcatggcataatccaagaatgatgtacgcatttgactacttaaattgacatctgtaattcgtcctgacaattcttctgacaattcgttttcccccttattttttgggctgtctaacttttaataatctttttagatatccaagtttttaacaaacacagcgttctcttcaatgaatttacgacgtggttcaaccttgtcacccatcaacatttcaaaatcaccacttgcagcatcagcatcttcggctgaaactcgtaacaagcgtcgattttctggattcatggttgtttcccaaagttgctcagcatccatttcaccaagacctttataacgttgaattacaggttttggtgatggtgataactgtccaagtactgtttctaattcttcatcagaatcgatatattggatcatcttaccttgacgtacttggtagagtggtggttgagcaatgtaaacaaatcctgcatcaatcattggacgcatgtaacgatagaacagcgtcaataatagtgtccgaatatgagcgccatcgacatcggcatcggtcatgataatcaatttatgatagttggctttgcttacatcaaaatcctcaccaaatccagttccgagcgctgtaaagagtgaacgaatttcttcattggccaaaactcgatccaaagtggctttttcaacgttcaaaatcttcccacgaattggcaaaatagcttgtgtgagacgcgaacgtccggacttagcactaccaccagcagaatcaccctcgacaatgaataattcactaattgaaggatccttagaagtattatcagctaatttaccaggaagattattgagttctaggccactcttcttacgcgtaacttcacgagctcgtttagcggcgacccgtgcttttgctgccaagattcccttatcaacaatttgacgtgcaaccttaggattttccaataagaatttattgaaagtttcagcaaacacttcgttaacagctgtccgtgcatctgagttacccagttttgttttcgtttgtccttcgaattgaggatcaggatgcttaacgctgactactgccgtcaaaccttctcgaacatcatcaccagacaatttatcatcattttcttttaaaatattgttgtttttagcgtaatcgttaataactcgtgttaaagcacgtttgaaaccttcttcgtgggtaccgccttcgtaagtatgaatattgttagtgaaagttagcaatttactttgatagccttcgatatattgcatagctacttcaacggtgatgccttttgtaaccccttcaacatagataggttcagggaaaattacttctttgccttcgtttaagtattcaacgtagtggcgaatcccaccttcgtacaagaagtcgtcttcagttggcttttcaggacgcatatccttcaaagtaatccgtagacccttgttcaaaaaggctaattcacgaattcgtgtttttaagatattaatgtcatatgtggtagtttcttggaaaatatctggatctggaacgaaatgaacaatagttccatgatcgtcaggatgttcagtatcaccaatcgttttcatcggtgtttttacttttcctagcgcaaaatcaatgtagtagattttaccgtccttcatgacgcgcgcatctaattccgttgataacgcatttacaacggatgcacccacaccatgcaatcctccggaaactttataaccgccaccgccgaatttacctccggcatgtaggaccgtaaagactgtttctaaagctggttttccagttttcttttggatatcaaccggaatcccacgtccattatcagtgacggtaatgctattgtctttttcaacgatcacatcaattttgtctgcaaatcctgcaagagcttcatcaataccattatcaataatttcccaaaccaaatggtgtagtccttgagaactagtcgacccaatatacatccctgggcgtttacgaactgcttcgagcccctctaaaacctgaatttgactcgcatcatattctctggctaattctgctttcgtttctttttcgtctgccaaaagcttattcctccttgctctgcattaaaactccgtgatcaatattaaagacatggggttcattaattaattgttgcgcaacaccactaaggctggtggttgtgatgaaagtttgtactttgttttgaatggcagttaacaggtgtgtttgacgactatcgtcaagttcagataacacatcatcaagtaaaagaaccggatattctccggtttcttctttcatcaaatcaatttctgctaatttaacactcagggccgtggttcgttgttgcccctgtgaaccaaacgtcgatacgttcttgtcattaaccataaatcgcacatcgtcaagatgtggccctactaaagttttaccttgttgaagctccttttcacgttgcttttggaaaagagcttgtaatgctgcatagattttttcagtagtatcggcttgatcactactgatcggtgaaacatattgaaaggataatttttcttttccctgcgagatttccttatgcacctcttgggaccatttttccaacttcttcaagaattgaatgcgttggaaaatgatttcagctccatgggctgctagctgatcacttaaaacatctaaataaacttggtcacccttaggattgaactgtagctgtttaatgtactggtttcgctgtttcagaacggatcgatattgcgccgagttatatagatatttcgaactcatctgtccaaattccatatcaatgaacttacggcgaactgctggagatccttttacaattgataaatcctcgggcgcaaacaaaatcacattaagctggccgacatattgcgataaacggctttgctcaaggtgatttactttggcatttttccctttggaagataaattgatttcaagcggtgtaacggtgtgttctttttggacactccctgatactcgcgctgctttggttttccaactaatcaaatctcgatcactattggttcggtgacttctagtcaaagctaagaaataaatagattctaatagattagtcttgccttgtgcattttcacccaatagaacattgattcccgaaccgaactcgacaacaagatcagcataattacgaaaattatgtaactccagtgtcttcagatacattagttaccagatttcattataatcttgaaagaaccttcatctggaacttcaactacatcatcttcgtaaagttttttcccacgacgatcatcgtgttctccgttaactaggacggtattttcacgtaaaaaccacttagcttgtccaccagtgccaataataccctcttctttcaagagttgtcctaaagtaataaactctgtgtttatttcaacatctttttgcatactatcaccccacgtatctcataatattatacctttattttaactaaaaaacaattttatctgtcttaaaacggcttctcagcgaatttaacccttctgaatgttttttgccttaaacgggttattttttctcaaatttacgtatacgcgtttttaaccagatttatccaaaaaaagagtttgagaaattaattttctcaaactccatagcgttactttattaaaatgttcgaacaggtgtgattaattgaataaagttttcttgatcttcagttggtaccaaagtaaatggacgtaatgctgaagtaaaggccatcttaattgatgtatgtccaaatgaacgtagcgcatctttcaaatagtctgggttaaaggaaatttcaaggtcttcacccacaatatctttagtaaccacttcttcttctacattaccgacttcaggagaatcaccagagatgattgcttgcttgttagccgcgttaatcgttaatttaaccacgttattgcgtccagcatgtgaaagcaatgaagcccgttcaatcgaagctaacaattctggagcttcaaattccatttcagttgaactttcctttggaattaaacgggatgtatctggatacaaaccctccaatagacgtgaatagaataaagtttcatcaaatgtaaataatgcttggttttctgaaatttgaagtgtaattgtatcaatttcatcatctaacattctggaaagttctaaaagactcttcccagggatgataatatcttcaggcattttaattggttctgggagattaattacccgttggctcaaacgatgactatccgttgctacggctgataatttatttccttcaatcgtaaaatgaatcccagttaagattggacgactttcttgattagaaactgcgataactgtttcattaatcatttcgctaaatacatcagcttttaaagtaatggttgtttgactatcaacttctggtaaatgagggaagttattagcatctaaaccattaattttaaattcagaagcacctgacgtaatggtcgtttgaaaaccgtcttttacctcaagtaacatagtgttgtctggtaattttttaacaatatctccgaagaaacgggctgttaaaactaccgctccggtactttcgatattaagatgagcttcttcatcgttagttgaaatggtggtttcgatagaaatgtcagtattgcttccagttagaattaaacgatcttcttctgcttcgatttttaatccagtcaaaattggaatcgtagttttagaagaaatggctctttgaaccgcatttaattttttgataaatgtatttcgagcgatggtaaatttcattttacaaaactcctttatgttgctctctgttttatatattaattaataataaaaagatagtagtagtaataagggctgttggaactgttaataactcaaattagccgtcataatttaacttttagcctgtggactacctgtggataactttcgaagttattaacacttatccacaatttaaggttttagctcactttttaaatctccaacttggcgagcaagttcctcatctttttctagttcagccttgatcttatcaaaggaatgaataacggtagtatggtctttaccaccaaattctgttccaattttaggcaatgaactttcagttaattcacgggatagatacatcgcaatctggcgtggaataacgatggatttcatccgtttctttcctttaaggtcagctactgtaacatggaaatattttgcgaccttgtcttgaatcattggaatcgtaatatggctaaggttgctaccgaaattcaaactgcgaagagcatctgaagctaaatcggtggtaatcgctgcgttttgcaatttagcgtaagcctggattcgagccattgccccctctaactcacgaatatttgaatcaatacgattagcgatgtattccaaggtttcgtcaggaatttcaacgttatctgcttgagccttctcccgcaagattgcaattcgagtttctaaattagggggcgtgatatcaattgaaagtccccacttaaatcttgataccaaacgttcttgcaacttcggaatttcatttggtaagcgatcggatgtcaacacgatttgtttttgggcattatacaaggcctcaaatgtatggaaaaattcctcttgagttgcttctttatccgcaaaaaactgcacatcatctactaataaaagatcaacgttacgatacttctcatgaaactcttccgtcttattcttttgaatcgaattaatgaagtcgttagtgaaggcttcacttgttacatatttaacgcgagttttgggatcattttctaataactgatgcccaatcgcatgcattaaatgggtttttccaagtcccactcctccatagaaaaagagcggattatatagaacgccaggttcatctgatacagccatcgcagctgcatgcgccatttggttaccactaccaataacaaaagtatcaaaagtatatctactattaagttgggtatcttcagtagaagctttggtttcttttttagaggtagcggacccttccgcctgctgtgtcttgaattcatcttccgttacgaattcaggtgtaatgtcttgatcagtgaactggtaggcatattcgacaaacttctcgatcaaatgctttgtccagtaatctcgatgtagactcgaaagaaccttaatcttcattatgtggttttctaatgaaatgggttctgccgtttctacccaagcaccgaaactggcctttgacatggagtcgtctttttcgaaactatttttaatgttgttccaaaggtcaatatagttaggcactttttcaattcctccaaaatttttagctcactaagtttaacataaaaaaataaagttatccacatggatgtggataactaaatggggttaaataacagtctgtgatctaagttatccacagggtgttatcaagcaattctcttttcgtagaaatttaagttataaacagaaacctgtggataactattattgttatatcaacgtttatttaacatatccacagatttccacaaggctgtggataactatataaacaccctgtgagcgaaaaaaatcgctgcgaaaaagcctgttgataagtcgaaatcacttaaaaagttatccacaaagtatagacaagctaacgctctgtttgtggataaaattttggattttattttaaattatttcctaataggtggtttgatttattctgtaggtatgatattatgttaaggtaattgtttaaacgacataaactgatttatcgaaaattaaaaaatagatataaaaattcagtatgtgtattttcgttcaggaggtggaccataatgaaacgaacatatcaacctaagaaacgccatcgtcaacgcgttcacggtttccgcaagcgcatgagcacaagcaacggccgtaaagttttagcacgtagacgtcaaaaaggtagaaaagtattatctgcataataaggccactgatcccagtggtcttttattttttaaatttttagagacaatagaagcttttttacatataatgtttgttagtgatatatatataggttgtggagagaaataatgcgaaagtcgtatcgaatcaaaaaagaacttgagtttcaaaaggtctttgaaactcgtaattcatttgcaaataaaaaatttgtcgtttacgtgatggacaaaccagaacaacctcactttagggttggaatttccgttgggaaaaaaatcggtaatgcggtaatgcgtaattatacaaaacgtcgaattcgtcaaagcattttggaattcaagcctcttttacgtcaagacgtcgattttttagttatagcacgtccacaagcttctggactaccaatgaatgaagttaaacaacaattggaacatgtttttaagctagcagggttgtttgcttcaaaacaaagtgaggaagaatagtgaaacatttaaaacgaaatatggcgttgctcagtgtggcagccctatccttcatattaactgcgtgtagcacagcgcccatcaccagtcacagtactgggatttgggacggagtgattgtttacaatttctcgagattcatcatctacttatccaagttgtttggtggcaattatggttggggtattattgttttcaccataataattcgaattatcatcttaccattgatgatttatcaaactagaacaacgatgaaaacagctgaacttcaacccaagttaaaacagttacagcaaaaatattcatcacgagatgctgaaagtcagcaaaaacttcgtgaagaacagcaaaagctttatgctgaagctggggtaaatccgatggctggatgtttgccattgatcatccaattaccagttatgtatgctttgtatgcggcggttagccggacccaagtgttaaaagagggtactttcttatggctacaattgagtgataaagatccttactttattttgcccatcttagccgccttgttcacatttatgagtacttggttgtcgatgaagtcacaacccgctggatcacaaaatggaatgacatcggccatgacgtttggtatgccactagtaattttgattactgctttaaacttcccagcagcgatcacattatactgggtagtaactaacctattccaagttggtcaaacacttataattcagaatccgttcaagatccaaaaagaacgtgaagaaaaaattcaaactgaaaaggcaaagcgtaaagcaattgaaaaagctaaacgccgagcaatgaagagtaaacgaaaataatttatgaaagcaatcgcaactgtttcgcaggggggattgcttttttaatggactaaatgcaggttgatttaagtaacgtgatgatggagtgatatgatgcccatagagctggattagattaatgagaataaaaaattgacaaatccgtctttaaattttatgatgtagttcgtataaagtgaatatgatgaagtagtgaaagtgctttgtccaccctatatccaagtggctaactggattatgggtggaactgcgctttttttattggaaaaagaaaggataacattatgcaaactgtttcaactgaatttgacacaattgcagcaatttcaactccacctggggaaggcggaatttcaattattcgaattagcggggtggatgcacttaaaactgccagccagatttatcgtggcaaagatttgaataaggtgaatagccataccattaattatggtcatattattgatccagaaaatggaaatgaagtagatgaagtaatggtgtctgtaatgcgtgcgccacatacgtacaccaaggaagatatcgtcgaaattaattgtcatggtgggattgtcgcaactaaccgaattttacagattattttagggttagatgcgagattggctaaaccgggtgaatttactgaacgagcttttttgaatggacgaatcgatttgtctcaagcagaagccgtaatggatttaattcgtgctaaaactgatcaatcgatgaaagtggcgcttgatcagttagatggaaatttatcccatttaattactaatttacgtcaaaatatcttagatgttttagcacaagttgaagttaacattgattatccagaatatgacgatgttgaaacaatgacagctcggttacttaaagaaaaagcaattgaagttaaagcgaagattcaacaattactttcaactgctaaacaaggtaaagtgctccgtgatgggctggctaccgccattattgggcatcccaatgtcggtaaatctagtattctaaatcatcttttacatgaagataaggccatcgtcacggatgttgctggtacaactcgtgatgtaattgaagaatatgttaacgttcaaggagtcccacttaagttggttgacacagctggtatccatgaaacagaagataaagttgaaaaaattggagtggatcgaagccgcaaagctctttcacaagccgatttagttatcttggttttagatagtagtgttccactgcgcgatgaggatcgagagctgctgagagaaaccaatcatatgcagcggatcgtcgtgctcaataaatcagatttagaagtaaaaattaacttaaatgaacttcaagaatatgtagatgataaagaaattatcaaatcatcagccgtttcacctttaggaaccaaagacctcgaggaccgtattgcagcaatgttttttgctggaagtattgaaaatacctctaataatattatggtaactaacgctcgtcatattggattgttgaagcaagctgaaacagctttagatgccgttcttgaagggattgaaacaggaatgccagttgatttagttcaaattgatatgacacgtgcttgggatttattgggtgaaattactggtgatagttaccaggacgaattattagatcagttatttagtcaattttgtttaggaaaataaatttggagttgaaaaatatgtctgaagtaaaacaatatgaagatcgcgagtatgacgtaattgtagtaggagctggacatgctggctcggaagcggcgctcgctgccgctcgaatgggtaataaaaccctcttaatgaccattaatctcgacatggtggcatttatgccatgtaacccttccattggtggtccagccaaaggaattgttgtccgagaaattgatgcattaggcggcgaaatgggtcgcaatattgataaaacttatgttcaaatgcggatgttaaataccggaaaaggcccagcggtgcgcgcgctgcgcgcgcaggctgataagcatgcttatcatgctgagatgaaaaagaccatcgaagctgaacctaatttgactttgcgtcaaggaattgtagatgacttaattgttgaagatggggtctgcaagggagttattattaacaccggcgcccgttatcaagctaaaagtgttgttctaacattagggacagctgctcgcggtaaaattatcattggtgaacttcaatattcatccggtcctaacaattctcaagctgcgctagagttaaccaaaaacttgaccgaaaaatatcactttgacttagagcgcttcaagacggggacacctcctcgagttgatggcggaactatcaactacgatgaaaccgaagaacaacctggtgatgaagttcctaatcattttagtttccaaacaccagatagtaagtacattgaacttaaaaatcaattatcttgctggttgacttacacaaatgaaaaaacgcatgaaatcattcgtgagaatttagatcgagctcccatgttttcaggaatgattgaaggtgtcggacctcgttactgcccttcaatcgaagataagattgttcgttttgcggacaagagtcgtcaccagttgttccttgaaccagaaggccgtaaaactgacgaatggtatgtccaaggactttcaacttcaatgcctgaagaagtgcagcaacaaattttgcattccattaaggggctagaagaagctgaaatgatgcgtcccggatatgcgatcgaatacgatgtggtagcaccttatcaattgaagaacactttggaaactaaactagtaaagaatttatatactgctggtcaaactaacggaacatcaggatatgaagaagctgctggtcaaggtctaattgcagggattaatgctggccgtcgggccctaggtaaggagcctttaacgctgaaacgtagtgatgcttacatcggtgtaatgatcgatgatttggtaactaagggtactaaagagccttatcgtttgttgaccagtcgtgcagaatatcgtttaattttacgtcatgataatgctgatttacgcttaacagaagtgggacataacttaggtttggttagtgacgaagaatataatgcattccttgaaaagaaacaagatattaaggatgaactacaacgtttgtcagaaattcgaatcaaacctagtcaagttcaagaattcctagaatcaaagggttctaacggcttaaaagatggggttttagcatcagaatttctacggcgtccggaagttaactatagtgacttattgaagttcattgatgctccagaaaaagatttagatcgtcgagtaattgaacaggtcgaaatcgaaactaaatatgctggatatattaaaaaggctcaagatcgggtggatcgtttgaagcggatggaagaaaaggctatcccagatcggattgattatgaagctattaatggattggccactgaaggtcgccaaaagctcgaaaaaatccgtccaactaccattgcacaggcttcacggattagcggggtaacgccagctgacattgcaatcttgagtgtttatatccaacaaggaaaaatcgcaaaaatcgcagaataacaaaaattagccccttgaaaaattcaaggagcttttttgtttcacaaaaaagaatgtttcacgtgaaactgaaaaaattaatgttagttctgctaaaataggcagtaaaaaaggagaatggcatgaagataattattgcaccagctaagaagatgcaagtagatacagattcctttgacgcgacgacgatgccagtatatttgaggcaaacccagaagattctgacgatgatgaaacaactcacgtactcagatcttaaaacgttatggaagtgtagcgataaacttgctcaattgaattatgagcgtctgcaaggtttagatttaaaatatcagctaacgccatcaattatggcttacgtcggaattcaatatcaatatatggctccagacttaatgacggaaaagcagttggcttatatacaggaacatttaagaattctatctggattttacggagtgctacgtccatttgatgggattgtcccatatcgactagaaatgcaagcgaagttaaaaatagacaactataataacttataccaattttggggagctaagctttatcaaaatttatataaagataatcgagccgtcgttaatttagcgtctaaagaatatgaaaaagccgtgcgtccgtttcttcaagaagacgataaaatgactacttgtatttttggagaaattatcgatggaaagataaagcaaaaagcaactccggccaaagaagctcgaggagaaatggttaattttatggcgcttaaccaagttaaaaataccaaagaactgaagagctttgatcgtttaaactatgcttaccgagctgatttatcaagtgctgataaaatggtgtttatcaaaaatgaacttcacaaataatggtttaaacaaattttgaacttaaatttaaggtaggcaaacacccatagattggcaaatataacagttatattgcaaaagtatataaaaatatcaagttttcatttcaaaagtaaaatttctaagacaagtaactaagtttgggctacaataagattcattaagagactaaagtgtttggaggaagatcgatgcgttttttgagagattggattttaccaatcgtaattggattattagttgcactgctagttaaaacattcctgtttcaatttgttaaggtagatggctcttcaatgcaacctaacctacaagatagtgaacgagtattagtttggaaaccaatggaagttaagcggatgagtgtaattgtttttgatgctcatggagaagatccggcagctactgaacccgtagattatgttaagcgggtcatcggtgttcctggggacacaattagttataaagatggaaagttgtatgttaatgataagttagttcctcaaaaatttattgatgaagaacaacgcacaacggggactggaaactggaccttagcttcaattgccaacaaatatggctgggctaagagtcctaaaaaggtacccaaggattcgtactttgtgttaggagatcatcgaagtgtttctaacgatagtcgatactggggatttgttaagaagtctaaagtaatgggtgttgtgaaggttccattttggagtaaaaatgatcaagctaagaaaaatatcaataagttagcaaccgattaagctaagaaagctgtgagatagtcgcagctttttttgtttgtttttatgaaggtaagcgctaaaattaaattaacgtaccagctagtaaaagagattggtaacttggaacttaatcgtggaggaatgaaaaatgaagcgtgatccgaattgtgttttttgccagaaaacaaaggaagattatattgttgaaaataaattagcagcgtcatttttagatttttatccagttagtaagggacatactttaatcgtacctaaacggcatgtccgtcaattgtgggaattaaatgaagaggaaagacacgcaatttttacattggtcgaaaaaaataaggcgatcttagaccaaaaataccaaccggatggatataatgtggtagtaaattcaggtgcggcggcaggccagagtgtttttcactgtcatatccatctcataccacgctactggaatgaagatccaaagcgtaaaccggttccgggccaattcttagtacctccggagcgtcctcaattcaaggggatggattagaaaataaattaaaaagcattcggtactttataaagtatcgaatgctttattattttaagaaataaaaaaacgtctcaccaggggggagagacgcatatacaggtaataagtaactggtcgttagacctttcattcaccttatggggggagtaaatgaaaaagttatctatagtgccactataaaaagaaattgtgaagaaagtgtgaatttttgattgctgagaaattacagtttatcgggtttaatgtaatatttcaaaacgggtaaaatttagtcctaaaaaaaggctaaaataaaaaagttctttcatttttaaatctacatagtatcatgaatccatacgagtataatgggggatttagatgtttcaaattataaaagatattatatatattattcttattctaaatattattggtgccgtttatacagtttttagacaacgtcgagatatagctgctacttgggcctggttattggtcttatttttcttgcctggtgtaggctttgtgatatacgcctttgtgggacgaaagctaccagaaaacaaattatttccgctgaaaagtaagactcgccttcaattggatcaagttatggagcatcagcgtcgagagctaaaaaagaatgagtttactgctgctgatcaagttgttaaagattcagaacgaatggtccaattctttactaaaacggattattcttttttaaatcgaagaaatgaagttcaaatcatcacagatggaaatgaactttttgatgatatttttgctgaaattaaaaaagcgaaaaagcatattcacgttgaattttatacaatttatgatgatcaaattggcaatcagttacgcgagctattggaagaaaaagcacgtgaaggtgttgaagttaaggtgctatgggattcatggggatcgctaggtaccaaaagaagtttcttcaagaaattgaatgaactaggcggagaagcgtatccatttctaggtacacgttcagctttaactgactttcgattgaacttcagggatcaccgtaaaattgtcgtgattgatggtaagattggttatgttggtggttttaatgtgggagatcaatatttaggccgtaagaagaaatttggttattggcgagatacccatttgaaaatcatcggttctggagtttacggacttcaatcaagatttatcctggattggaatgctacagaccgtaaaaaacaaattgtcgaagagtttaaagctggatcagtttatttcccagtcgctgaagttaaaggcaataccagtcttcaaatcgttagtaatgggccagattcagatattgaaaaaattaaaatgggttatttgaaaatgattcataaagccagagaatcggtttggattcaatcaccatatttaattccagatgatagtgtcttggacgcattgcgcttagcagcaacatcgggagtagatgtccgagtaatgattccatgtatgcctgatcacgcgtttgtctatcgtgcaacccaatattatgcttggcagtgtgctaagtggggaattaaagtttactactacaacaatggtttcatccatgctaaaacgatggtagtggatggaaaaatatctacagtgggttctgcgaatatggatttccgtagtttcaaacttaattttgaagttaacgcctttatgtatgatgaaaatattgcaaaacaattgcaggaaatttatgaagaagatatcaaacattctagtctccaaaccgtagccatgtttaataaacaatccacatggctgaagttcaaacaaaccttttcacgtttgctttcaccaattttgtaagtaaaaagagttgacgttatttttaacccgtgataatcttgtaaaaaatcaattaaagcattttaactttcacattaagtagtgcataatctgggtgtcagaaagtcggtggttgctgcgaaccgatcagggttatgttgtcgaaataccgtggaatagtttaatttaacggaaaataactagaaccgttatcaatctagtgagtgaagaggtctttttgggttctcttaagctgggtggtaccacggtctccatatcgtccctgttgcatttatgatgcagcagggacatttttttggtcaaaataagggggacttggaatgaaaaaggttagtattttagaaactagcacggtattggttttaatgttagtgataatggggctaggagtaattaaattaaaattatctcctcaaacgccagtattgttagttttaggtttaataacgatgtgggctaagctacgaggttttgaatgggaagatatcaatcaaggaattaaaaatggaattgaaacggggattatccccatctttatttttattttagttggggcactaattagtgtctggattgcagccggtattattccgacgttaatggtaattggttttaagttgataaatgtagcatggtttgttccttcggtatttatcgtctgttcactagtcggtaccgctgtgggttcagcatttacggtaatgtcaacggtgggaatagcatttttcggtatgggagtcaccatgggagtcaatccggccctcgtggctggagcaattatttctggggcaatttttggtgataagtgttcgcccctttctgaatcaactaatttgtcggccgcagtagtagacgcagacctatttgatcatattaaaaatttaatgtggtcaacagttccagcatttgtaggagctttgattttatttacgataatggggatgggcgaagctaaaagtgcagacatgagtaagattaaccaaaccgtggctattttagaacagcacttcaacgtcaacttctgggttattattccaattgctttaatgtttatctgcgcttggatgagagtaccggccgttccaactctatttattaatatcggggtttctgtaatgtttgtttttatcggcaatcctcagattacagtaacaaaaattgcctcaattattgaaaatggatttatttcaaagactggtaatatagacgttgatcagctattaactcgaggtgggattgctagcatgatgggaaccgtagctttgattgttgtcaccttatctttgggtggtattttagtacacttaggcttaatcgaacaaatcatggcaccaatcgcgcaacgtttaaatagcgatgggaaactaatcttagcggtaattgctagtgcaattggggtgaatttattcatcggtgaacaattcctatctgtcatcttacctgggaaagcatttaaaccaacttttgaacgctcagggctagcaaacgtcacactaagccgtgcgcttgaagatggtggaacagtaattaattacattgtgccatggggggtagcgggtactttcgcggccaatacttttcatgtagcaactttaagttacctaccattcgtattctttagcttgttgtctccagtattctcaattttaagtggttttacaggaatcggaatcaaacatcgaaattaaaaaaacaggttacaagaggagaatattactccgattgtaacctgttttgaggttcagtaaaccaagcgactaaatggtcactaattgcttttgatccttctacgttaggatgaacttcatcatttgtttcaattacccaatctaaagttggaataagttcgatttttaaggctttagcgacgttcttgatgacgtgggaatgtgcctgattaaaaggtgtaattataataattctggcatgagggaatcgctttttaacttcatttataaaccaaacaaagtacatttcaaaaacatcatcctcatagcgagcatcattagtcccaagattaattaaaaccaaatcaggattaatccgaggagctttaacgctaaaattgacatattttacaaacttaccagctgggggaactcctcccgttccgtaacggattataccggcagcactataggcaatacgataatcttcccaatctaaagcgcgggataattgagcagcatagttaaggtcggctccataaccgatagaaggtgctttactacgaacccaacagccagcggtgatagaatcaccaataaaagcaacgagtgggccagccggtttaatagccgctagggtgcctgaggcaatcgtgatatctttaatggtaagtccgtcattacctaaccaaatctcatcttggtcagtattgcctgtaaaataaatccgaacaatatgagactgatttgaacttaatttaaaatcatttttagactgagtgagtggggttaaatgtaattcatcatcgatataaatgcttagagtttgaggagcagcaagaggcttaattaccacttctaaggtgaaataatcagcattttgaacttcaaacaaaatttgagcgcctaaattagtggtatacattgctggcttagtttcaacggtttgagttgtccaacgtcccataaaatagacgttaggaatgcacccattagccgaggtagggatgatttgattcatagtaagcctccgattttaagttaaccaggattatacatacattctatttcatgatcattaatcaagccgatagcttgcataaaggagtacgttgttacgggacccacaaacttaaaaccacgtttttttaagtcagccgaaatcatttcagagagcggggttttggcgtgaatttcctcaggaattcgaatatggtcgttaatctgacggttatttacaaatttccaaatatattcatcaaaactaccgaattcaagctgaatttcaataaaggccttagcattagaaatagtagccgctaatttacctcggtggtgtagaatttcgggagtttccattaactgatcaatatcagcttcagtcatggctgctaccacgtgaacttcaaagttatggaaaccttttttaaaggctgcacgcttattaataatcgtgttccaacttaaaccggcctgataaccctctaaacagagcatctcaaacatgtaacgatcgtcatgggagatttgtccccattctttagcatggtattcttgcatgagttcagaagcattttgagcccatgtacagataaaattattgttcattttgcattctccgattctaaataaaaatgcttttaactccctttgaaaaggtaattaaaaacattagtttaattaattcaattttagcacatcttacatatcccgatcgtagccattaaataacaaattaagaacgacagcagtgatactagcaatcacgatgccgttggtaagtagcattttaatagtagcgggaagggcttggtaaagttgaggataaatggttgagccaagtcccataccaactgatagcgaaacgattagaatgtttttagtctggttgaagttgacttgttgtaagatacggaccccttgaaccccgacaattccgaacattaccaacatagctcccccgaggacgctggtcggcacaatggtggcagtggcaccagccttaggaagtaaccctaaaacaataaggaaaccagctgcataatataaaggtttacggcttttaacgcctgaaagctggagaacacctacattttccgaaaaagttgagtagggaaatgtattaaagatccccccaaggatggctgcaattccttctgaacggtatccacgttttaaatcgtcttgagtaatttctttacctaccagatcacctaatgcgaaaaagacccctgtcgattcaatcattgtagttaaagtaaccataatcatggttagaatagcggaaagattaaaggtaggaactccaaaatagaaaggttgaggaattcgaaaccaactagcttcagcaatgggcgataacgaaaccatgcccataaaactagcaaggatggtgccgattaaaataccaattaagatggcgatagaacggaaaaaaccgcgagcccacacattaatacctacaataatcaaaacggtgattaagcctactaatagattacggggatctccaaaacttttagcagcaacatttccaccgccaatatcttgaaaggccacaggaattaaagtaaagccaattacggtaataattgagccggttacgattggtgggaaaagtcctttaattttagagaaaagtccaccaactagaaatacaaagacaccagaagcgataattgctccgtacatggcggtgacccctagagtccctccgatttgctggaggggttggacggcttgcacggcgcaacctaaaacgacagggagaccaatcccagttaggggagtgcgtttaatttgtaagagcgtagcgataccacacatgaaaatatcaacagagactaaataagtcatttgagcggctgtaaaatgtaaaaaaccaccgattaaaagaggaacaataacatcgccagagtacatggctaaaaggtgttgaaagcctaaaatagcagcttttccttcagttaattgtggtttaatttcagttacaggaacttcggtgtaacttgattcagttgttttcatgaattctcatcctcgttttcataattttcaaatcaatatgaaatcgagcctataaaactaaaaaagctcaagacaaaaagtctcaagccatcataatacataagagttagttttcctatagtccaacatttacggcgttgggtagaaactgtcaaccagattaagacattatataggctaagttttatttgattgtgactgaaattttaacatataaaaattaatgaaacaaccattctcaaactagaatagttattgtcgaaaaaattggagaaagaaacaaacagatttataatgtaaaaaagactatttttaggagaaatcaatgaacatattagcaattggaacagaacgagttatttccaaaaaagctttagaagaattaaaacaaaaatcagatttttcagtaattatatgtacgccaaagcaagttaaaaacattgcggcgattaattatgatgtaatgtatgttgatatgcttcacctcggaatggatgaagaatttgaaggaattattgatcaaattgaggctggtgaaattaaagcgaacaaaattatttttctagcaacggctggcatggataaagaaatcaatccaaactggattgaagttcaagatttgaaagaactactattagaagtcaaatatgtggctaaattagtggatgagactgagcttccatatacaattttacgaccagttgaagttagtggtgaagttcagaatgtagctttaaatataattcctgaaggagaaaagattagcgtagatagagttagtgaagctaacttaagaacggtgattattgatgcaattacgaccaataattatattaatcagtcggttggaatttctaataaaggataggagaaaatatgccacttcaatttatgtatggaccggcaagtattgaccatctagaaggtattgccgacagggtaattgaacttcagcaacagaatgtcggtcggccagtatattatttggttcctaatcacatcaagtttcaatccgaaatacaattacttcaaaagttgcgacagagaagagatgttaagagtcatatttttgcagaaaaggatgttcaaattctttcaattagccgattagcctggtttttcttacgaaatagcagtatttaccaatatcctcgcgtaacgagctcgagttctaatatgctgttatatagagtgattttagaacatcaagatgaattaatcttgtttcataatatagatgctcagttggggctggtacagaagattgcaacgcagttagctgaattcaagcaagggaatgtagggcccgacgaattaggtcgagttgcggaaaatattgccgaaaacagcgatgcagggatggatattaaggctaaattacatgatctaggcataatttatagtgcttatgaagaagaaattcaaagccgtttcattgatgctagtgatattacgcatactttaacagatgaattatctaaaatggatctgagtggtcagagttttataattagtggcttttcaaattttactgctgaagaaatgagtctaattcaagccttaatgaaggccaatggaaatgtcattattgatttaataatggataaatttccgctttatgaaaaagtttcagaaaacagtttgttttttgaaaacgaaaaaataattttcaaatttaatgcgtgggctcatgaaaacaaggtgaaatcactagaaccagttcgtttacaccgagttagagttaattctgatcttttaaaattagaaaaatattggatcgaatcaagtgaaggtcaagtaggaggttctaaacaagaaaataacgcatgtgttacgattttccaagcgaatagtcgttatgcagaagtagaacatgtggcgactttaatacgccaaaaaatggctaaagatccaagtttaaaattttcagatttttcagttttaacccgacatttgagtgactattcaacgattattaagccaatatttgatcaaatggagcttccgatcttttatgatcttcaaattgcaatgaaagatcatccattactagaattgattaacgctttgtttgatattagagcacatcattttcgttatgaagatgtaatgcgtctattaaaaacgggtttgttatttccagaaactgaggatgacccgcacgggatggacttcttcaagagtgtgcatattactgaaaattacgttttaaaacaaggaatctatggagaccgatggcttcagaaaaaagattggaaatatagtcgttttaacgatattgatgaagagaagcagacggatgaagaaatcgaaattaatcagcgaattaatacggtcaaaaattatgtagcggaaacagttatgccattttttaatcaactttctactgcaaccactggtgtggaagcagccaaggccttgtatgactttttaattaaaaatggaattgatcaatgcttacttgcttggcgagaccaatggattgaggaagggcgtttggcgaaagctgctgagcccgaacaaacttgggaaacttttatccagatgctcgatgaatttgtcgatattctaggagatcagccatttgacccagataattttatgggtcttttaaatgcgggatttgaaggggcaacttattcgcaaatcccatctacactagatcaaattctagtttcagaaagtggaatggtccagatggttgaccgtaaaattgtatttatcatcggagctactgatcgagtaatgccggaacaaattcaagataatgattttttgaatcaagatggtaaaaatcaaatagatccgttcttagatgatgatcaatttttgagaattagtaatgatcgacagatgcgccaagaaccataccttaattatctaacgtttatgattggttcagatgagttaattttctcttatccaaaaagtggaaatgatggcgtagaattaaaaatctcgccttacgtagaacggattggtaaacattttgggattatcgcccaatcattaccaagtcgacctacaactgagccggttcgactggatccaccatttatcgagctatttattggttccaatcgaagtacattgagtcatttaattcagtatgcgagagccatgcatgaagctaaaagtgaagcagacccacgctggaatctaatttatacaattttgagacagagtacattgggttctttaacagatcagttactaagcagtctggaatataaaaatattcccgaaaaattgaaaccagaaattgtggaaggtctttacggcgatacaatttatgcttcagtatcgaagctagaagagttttatcgaaatgaatattcatactttttaaaatatggattgaagttacaagaacgggaaacatcggatttgagccccgctgatacagggcaatatttccatgcagcaatggataaattaattaaaatgattactactgagaatctgaacttcaatgaagttaatcaagaacagattgaacaaattgcgaaaagattagttcaacaaatggagcaagatcaacaatttgaccagtttaatggaacttatcggatgggatttttgcgaaaacagctagatcgaacggtgcaagcgatggtcgaagcaatctttaaacaactggctcgcacacgaatgcgtccgattgcatcggaacaattatttggtcagattggttcgcaatctggattgccagcattgaactttaaggttggagaagtcaaggaaattaacgtacgcggtaaaattgaccgtattgataagattgaaattggcgataaggactatttaggaattgtcgattacaaatctagtaaccgtaaatttgatttcacagatgcttactatgggttagcgatgcaaatgttaatgtacttggatgtagttcagcgtaataaagaaaagattgacccagctacaaaagcagaaatttcgagcgcattatatatgattttccagtacccgcttctaaaatcaaaagagtggaagggcagcgatgctaaccaacttaaccaaagcatattcaaaaaattttcactaaatggatttttattaaaagatgaggaattaataaaggaaattgataagacgattgaagacaccagaaagtccgatgtatttccaattgcatttactactaagggagctttaacgaaggttagtgaaaatagtatcttaagcgaagatgaacttcaaaatttgattaaacatgcagaattgaaggtacgtgaagctggagaaaagattttcaagggtgagctagatatgaatccggtacagtggcctaatcgaagaacagtgatggaatattctccttataaagatgtcatgcaatttgatgtgatgttacctgagaataattatcgaataattgataagttagataaagatcaagtactagaacagattcgggaggaacaggaaaagaatggcagatagagagtataccttaagtcagaagcaagcaattaatagttccggccacaacattttagtctctgcttcggcaggatcgggtaaaacctccgttttggtggaacgcgtaatccaaaaaattattaatggtgaagatgttgatcgtctattagtagtaacgtttacggaagctgctgccagtgaaatgaaggaacgtattcgagcagcgattgtgaagaagattaatgaagtgagtgatattgaacttcaaaatcatttttcaatgcagctcaataagttgaataacgcgaatatcagtacacttcatgcattttgtatgtcgataattagaaactattattacatcattgatctagatcccacgtttagaattatggatccaacagaaagcgagttattgaaagaaagtgtctgggcggatctccgggaagaattatacgagagggatgaggatggtaaatttgcgctcctcacgcgtaatttttcaagcgatcgttcggatgaggggctgcaagatttaattttagaattatttgagttttcgaatgctaatccagaccctcaagcttggttacagcagattgctaaaaattacgaagttccatctgataatgttatggatatggagtttatccaacagcttttaacagaagtaaaaacaaagttgatgagaatttatcgcaaagacctagatcttacagaacaagcaatcaatggtggagaacctttaaaaaatgcagctgaaaaattccaaaatgaagttgatgatttaaaaactattatcgacagcttagatggtagttgggatgatttacaacaagccgttagcaagatgaagttcgcgcaactaccacgaggtaaaaaagaagaagtccaagaatttaatgcatacgctaaatcaattcgaaatgattttaaagatgagtttaatacaattgcggataaatactttaaattacctagtgagcaaatggttgcggtcttcaaggatgctcacgaattaatgatgaagttaattgaagtacaaaaccaatttgcggaacgctttttacaggaaaaactaacccgccgttctttagattttagtgacttagaacattttgcgttacaaattgttttagatgattctgaagaaggccaagcaatcagacgcgatttccaacaaaaatttaatgaagtcattgttgatgaataccaagatattaatccgcttcaggaaacgattctgacgtcagttgccagtccagacccaggaaatatgttcatggtgggggatgtaaaacagtctatttacgcattccgaatggccgatcctagtttgtttattagtaaaaataatcagtttaaagatgaagaacaagcagatgaacggattattttagcagaaaatttccgttcgatgcgaaatgtcgatgattttactaacttaatttttaaccaagtaatggatactgaagtaggagaaattgagtacgatgatgatgctcaattgcaattcggcgcaaaatactacccagatgaagttcagaataacaccgaggtaatgatttatgacgacagccaaacagatatagatgataaagaagctactccaattatctcaaacaaaaatgacggtcagttacagatgattgctcaacgtattcaaaaactatttgcggatcatactcagatttatgataaaaaagaacaaaaaatgcgggacttagaatatagcgatattgctctgctacactcaacgggtagtaataaccttgagattgttgatacatttaagaaatatggaattcccattcaagttaataatgcccaggattatttccaaaccacagaagtttcaatcatgatggcgttattgaaaataattgataatccctatcaagatatcccattggcagcagttttaaggtcgccaatggtggggctgaaggaaaatgaactagcctttttacgaattggaaagaaaaatgggcattactttgaggcactactttatttcttgaatgaggccaagctagattctaataatgagttccaaatgcagttaaaaacaaaaataactcactttttagagcaattagatcgttttagtaaattagcccgtcaatcaactttggtggacctcttatgggcaatttatgatgaaacaggttatctagactatgttggtggaatgcctgatgggccacagcgccaaaataatctacatgctttgtacgatcgggcgaaagggtatgaggagtctagttttaagggactcttccaatttgttcgatttgttgaaaaaatgcgagataagaataaggatttagctgaaaatccagtagttactgatgtcaaagctgtgaaattaatgacgattcatgggagtaaagggctagaatttccaattgtattcctaattgatgctgaacatggattcaataccatggatgagaaaggacgttacgttcttgatcgagacgcagggatgggaatcacattgaaggactttattcatcggttagagattgatacagtccaaaagaattggattatttcaattaagaagcaaaaggcattggccgaaaaattgagagtactctacgtggccttgacgcgagcagaacaaaagctaattatcactggagcagttaattctgcggatgacaccttgaacaagtgggccgaagcggtagacacggacaagatgttaattcctgcggaagctagatctaaagtaagtaactttttagattggattggaatggcaattatgcgagtaccttctgtggttgaaaaatacgcagattacaatacccgaaaattgcaaggtacactgatttcggatgtagaattgaaaattattaatagcagtgggttaatggatcagcaaggattaacagctttaaagtcagcgcagatacctgagttacagcagttaaacgcttctgatgatatagctgatgttgataagcttaaacaaattatgaacttcaaataccatgatgaagccgcaacgacaacaaccgcctatcagtcagtatctgaaattaagcgagtttttgacgatcctgataaattcgaattgaattttagtgaggttgatgcagatcaacacattaaaccacaaaatcggtttgtaacggaaagtttaatggctccgcgttttatgaatgaagcgacaaagcctaaggcagctgaaatagggaccgcaacgcatttaattttgcaacaattagatttgaatcaaccgattaatgaaacaattattaaagataaaattggtgagttggtaatgaaccgagtgttggatgaacaagttgctaaccggattcgtatttcaacagtattagacttttttgatagtgatttaggacagctaatgatcaaccatccagaaaatgtacatcgggaagaagctttttcgctattactgccggctaagggacttttccctaaagttaaaggtgatgacgatgtgttgattcatggtattatcgatgcatatttcgaaatggaagatcgagttatcttattagactacaagaccgattttgttcttccggggagcgtcgaacaaggcatagaaaaagcaattaatcgataccaagggcaggtcaatttatacgcgcaagccttagagagcattttgaaacgaccagttaatgaaaaatatctttatttgttatcgattggacgactagtagaaattcaataaaaaaagctgcaactaatctaatatggcaaaattagttgcagtttttttgcgaaaaagtgttttaagagaccactagattaagagatggggaataatcctgaagcgcgttttaactacagatgaacttcggagcaaaaaaatgtggataattgtggataactttgttaataactaaaaaagtacgaaactatttatacacaaaagttattaaataaaccttaaggcctgtcgaaaagttatccacaggcagtgttgataactgtggataaaaaagtttataataattttatattgataaaaacgcttatttgtaggcgatgtaagcgtgtggaatgaaacaaaaattaagttgggtaattgtggataactaaaaaaactgttgacaaaatcttatccacaaatgtagtgccgaacataaattcgacccaatatgttgtgagtgcaaaaattagcctgtggataactttgttaataacttaaaaaaggatgtgcaaaagaagtgaatattaaaattattgttgtgggaaagttaaaagaaaaatatttgaaacaggggatagcagaatactcgaaaagattgtcaaaattttgtaagttccaaattattgaagttccagatgaaaaagcacccgaaagtttaagcgatgctcaaatgaatgaagttaaagttaaggaaggagaacgtattttaggtaaaattaaagatcgagactatgtttttaccctagaaatcaaaggaaaagaacgctcttctgaagaattatcagcagagatggctaaattagctacttatggaaactctgatatcacatttgtgatcgggggttcgttaggtcttagtgatgcagtaatgaaacgttctaattccgccatttcatttgggcgctttacactaccccaccaattgatgcgactagtgttaactgagcaaatttatcgttcgtttatgattcaggcgggaagtccgtatcataaataaagaattcaataatatacttgtacgcttaataaaatattagaagaaacgactttccatgatgaaagttgtttttttgtaaacttaaagatataaaataattggtagtttgaaagttataatataagtaaagtctgaaatgaatggggtataaacttatgaaaaaaaatatcgatgttgttggagctgcttttatagaagatgataaaattttagctactaaacgtagcgatgaccgcattttaggaacgctttgggaatttccaggtggaaaaattgaaaaaggtgaaactccagaacaagctttgaaaagagaactatttgaagaatttaatgacgacatacaagtcggtgataaggtaacagatacaagtagttttgaatatgattttgggactgtaaatcttacagtatactatgcaaaatttataactcataattttaatctaattgctcatagtaaagtagaatggatgtcccaggaagagctaaaaacagtaaaatgggctgatgctgatcaattagcagtgggtgagatatgtaaagctgatctttcgaaggtgaaattcggatgaaattaacaaaaataaaaaatgaaattcaaaatgctctgacacaaggttttgtggataaagatattattgggaacgaagaaatggtgccgcggttcattttaaatgctaaaggagatacaatgcgtgatcatattgatcatgagcttattcattgttcatcatttatctttgtaatagcgtttattacagaaggcgctcttacaccgttaaaagtaaaactggctgatttagctcgaagaggtataaaggggcgaatactgacttccgattatttggagtttaattcgccaaaaatgttctatgagttaaaaaaattaaaaaatgtagaagttagaattgcagatattcatacttttcatgctaagggatacatttttaatcataatgatgtttaccaaactgcaattataggtagttcaaatcttacagaagcggcagtagctactaattatgaatggaatcttagagttacatcttaccaggatggagaaattactagaaagataattgaggaaattgaaaatcagtggaaaaagtcacactctttaacagaaaagtggatcgaagagtacaaaattaaatatgaaaaaagccaacaacgctatttaaaagcaaaaattgaagaagaaattccagagtatgaaacttcaaaagagatcaaccctaacttaatgcagcaagaggctttaactaatatagaaaatatccgatctaatggagctcaaagagcactagttatctcggcaacaggaacgggtaaaacatatttgggggcatttgacgtaaaaaaatttagccctgataaatttctatacatagtacacagggaacaaattttagataaaactatatccagttttaagaagattcttagcaatgaacctgcagaggcttttggaaaagtatccggaaattcaaaagattttttgaagggaaatacctatttgctaccatacagacgctttcgcgagacaattggctagaacgtttcgataaggatgaatttgattatatcttagttgatgagacacatcgggctggagctgaatcttataaaaaagtgttaaattattttactccacaatttatgctaggaatgactgcaacaccagacagaatggacaattttaatttatatgaattgtttgactacaacattgcatacgaaattagactgcaaaaagctttagatgagaacatgttatgtccgtttcattatattggcattactgactatgaagtagatgggcaaattactgacgacactagtcaactaaattggttagtatctgaagatcgtgtagattacgttattaaacagactgaatattacagttactcaggagaagctctccaaggtctaatattttgtagtagaacagaggaagccaagagattagcggaaacacttagcttgaagagacatcctagtaaggcattaacaggtgaaactcctcagtgggaacgtgaaaagattattaaggaactggaacaacggaaaatagaatatattattacagttgatgtttttaatgagggtattgatataccatgtgtaaatcaggtagtaatgttaagaaacacacaatctagtattgtttttattcagcaattaggacgaggattgagaaaatcagaaaataaaaaatatgtaacagtcattgattttatcggaaattataaaaataactacctaatccctattgcactagttggtgataagtcgcgggataaaaatagtgcacgagatgatttggaattaaatgaaattgcgggaatatccactgttaatttttcggatattgcaaaagaaaagatttatcaatctataaataatacatctttagatagcatgaagatattgcatgacgattatgaagatttaaaagcacgtttaggaagagtccccctcttattagattttcaatcttttggaacagtaaatagttccgtttttataaaaaaatatagaaattattaccagtttttgctgaaaatgaaggaagagtttcatttgactcatgctgaagaagagatcctaactttcatttctgcagaattaacgaatggaaaaagaattgttgaacttctattattagaagaaattctagaatgtgatggacaattagtaaagggagattttataaagtctgttagagaaaagggaattttttataatgaatcggtagaaaaatctgtagaacaagttatgtcattggaattttttaaaaaagctaatcggaaaaaatatggaatggaacaaatagtaaaagataacaagaatatctaccaaattagtgaaaaattcaagaatagtttcgagaacaatcccgatttcaaactattagttttggatgcgataaaggcgggactggaaaatgcaaaagaatacgatataacaaaacctttttcattatatcagcggtattctagaaaagacgtttgccgaatcatagggtggacagaaggagatagttcaaccgtgtacggatataaagttaaggaaaatgtctgtccaatcttcgtaacctattctaaatctgatgccatagaagatagtattaaataccaagataaatttattaatagagatatattccagtggtacactcgtcacaatgttaaaattgattccaatgaaatgaaaaaaatattaaataaaaacacgactatccaattatttatcaagaaaaatgatgatgaaggtagtgatttttactactttggggaaattaatgttgttcaagctgaacaagaagaatttcaaattaacagtgataaaattgaacctatagtcaaagttcaattgaaattaaaaaatactgttaggcaagataagtataagctttttgaaaagtaatgtggttgctgaaaaataacatcgatattaaaaaagtttgaagctagtttggtacaaaagtatgagaaaaatatttcaaattatatgaacaaataaaaaacgcctaaaaaggcgttttttatttatcctaaccattttcccacaattggaaatttgccttgcaaccagacaaatggtcgggtcttaatgatacgttggtgagtttcaggtgaagctttttttacagagattaaagcgagaatgaagaatggagaagctggcataactggtagcgctaagccgattattcctaggacagtattgaagaaggcagaggttagccaaaaaaatcgtgtgattatgaaagtcatttagtcatctccttaaggatataagttagcatgttttagtaaactaaacgagcaaaatggatgagcttttaaagttacttaagaatattaaatgaatttttagacagtttggcttataatgggcgctaaatatttgaataatacaggcagaaaaataagatcgataatttcaacttcaggtgaagttaaagtgaggtgagaggtaatgaaaaaaccgaaggcactagtacgcggtgataaagtagcgatcgtgagtctatccagtggagtattgggtgaaagctttgctgaacacgaattgaagcaaggaatacaaagactaaaagaatttggtttacaaccaatcattatgaaaaatgcttgtcgagggattgaatacttaaaatgtcatccagaggccagagctgctgatctcaaacaagcttttatgacagccgatattaaaggaattatttgtgcaattggtggggatgatacttatcgtttagtgccatatttgatggaagatgaagaatttattagggcagttcaggcgcatcctaaaatttttacgggcttttcagatacgacgatcaatcatttaatgctaaataaactggggctaataacgtattatggtccaaacctattgaatgatttaggcgagctagataggcagatgttgccttatacacgagaaacttttgctagctatttgaaaaacgaaattccagtcgaaattaaatctagcccaatttggtatgatgaacgggtcgatttctcgataaaagcactgaacacaccacgtgttaaacatgatgaaaaacatggttaccttgtacttcgtggaaaagggaaagttacaggaagattattcggcggttgtttgaatagtttgggtaaatgtgtcttaggcgaaggtcactctgatcaaccagctattattcaaaaatatggcctattacctgaacccgaaaaatggttaggaaaaattctgtttattgaaacaagtgaagagaaacctacgccaaaagagtatcgaaaattattagaaaccctagatcaatttggaattatatctaaagtttcagctataattgttggaaagccacaagatgaaatctattttaacgaatatcaaaaaatattacttgaggtaacagcggtttatcaaactccaattatgtttaacttaaattttgggcatgcttatccccgaacagtaataccctacaatttagaagttaccgtcgattttgatgaaagaactttaacagtccaagaatccttgttcaactaaaaaaatccgcctttaaaaggcggatttttaattatctgacgataatattgccatcggaactagtgaaagaataatgagttttctgagatccttgatgatagtaatttgtatttttaccaaaaattttaacgtgcccgtcgtcgctatctgcattaattgctagattacgggaatccttcagagtagtatgaatatcgccatcactagtacgaccggttaaagattctgaaatactaagccgatttaagttcagatcgccgtcatcactaactaacttaagctgtttgaagtcagaatcattaagttcaagatcaccatctgaagttaaaatttttgatgagcccttaatgaattttgagtcattaatagtaacatcgccatcactgctatcataagcaagacttgctgctgaaacttgtcgtaactctaaatcagagtaaccactaacttggagttcgtctttaacgttaactttgtgcaaatcaacatcttcatttgaagatagatggatttggttgaagttcaaatcagtaatagaaactgtaccactagtgttacaaattaacttgttaagtttactagtacttggtacataaatagtaatcgtagacggtgcaaagtttccaagtcctagattaaaggtaaaaccatttcttgaattatcgttaatagaaagttgatggttggctgcttggtaatcaagggtattggttcctcgataagtgactttaatttgggatccagcgtaaggtttaatttgaacatcatcatcggcgttgattttcaaattatgaacttctttgaaggtagcatgtttgattgaagtatcttcgattttgaatccaccatcatgccaaattaaattatgatcgccgtgatgtaagatgcctaatcctaaaaggacggctcctaaaatggtgatgataatccccgaaataagtgtttttttcattaccgatcacctcttttttctgttcttcttgtgacaatcttggcatataaccatctaaagaaaagggaagtcccgtgaaggattaatattaatatccatcgaataaatggaattaaaattaaatatattccgattactaacaaaccaaaaccgatgtaataaataccagtccaaaaagatgttgccaaaagagttagaccaataataaaaataataatagcaatgatgccaaagatagtgaaagccaatccaaccccaagaactgcaacaatcattccaaaaataacaccaaatatggccataaataagcctagcgctagaggaattgtaataggggtagagaaaatggccaggatgatcaaccaaatggttttaacatcctgccgtggacgtttaaaatccgacgattcgggttcagattgttcaccagctttaatagaatagtctgctaagattttccgcgccaattgtttaggtgttcctaatgaagaaactgcttgttgatagcttaccaagccactatcttgtaaatattcgctataaaactcaatcacgtcagaccgttctgcgcgcgtgagcggagataaatgggactctaattcttcaatgtaatcattcattcaaatcaccccttgaaactagtttatcaatcctatttttgaaggtaatccattctgcttgaatttcagctaaacgaactttacctgcttgagttatcttgtaataccttcgattacgtccttggtagggttcatcataggttgttaaataattattcttttttaaacggcgtaagacaggatacatggttgattcagaaatcggaaagtctgcttgaactttctgtgtcagagcataaccatagtaatctccatgatttaatattcccaaaacgctaccgtctagcaattcggttggaatttggattgccatatgttcacctccataatactatatctcatatagtattataaatgattaaaatagtaaagaaaacccccaagcttatttacaagcttgggggttgaagttcaatttaacgtaaaattcgttggatatcgcgagcaatcattaattcctcattagttggcacaacgagaacttgaaccgcatcagttacttgattaatctgttgttctttaccacgtacattattacgctcaacatcagcattaatgccgaagcaggtaagttgttccataatgcgttctcgcattgcaattccattttcaccacagccagcagtgaaaatcagagcatctaatccaccaagttcagccacatagctaccaataaaacggactacgcggttaatgaacatttccaatgctaacttagcttgaggattagaattttcggcgtcttccaaatcccgttggtcaggagataattgggaaattcctaacagccctgatttttgatttagaatatcaatcacttcgttaacactaatccctaatttttcagctagaaaaccgaccagtgatggatctaaatctcccgatcgagtcgccatcattaccccgcctaagggagtgaatcccatagaggtatcgattacacgtccttgattaaaggccgtaattgatgaaccggaaccgagatgacacgtaatcattttcaaatcgcttaaatctttttttagaagatctgctgcccgattggcgacataccgatgactggtcccgtgcgcaccatatttacgaatccctaagtctgtgtagtattcgtaagggatgggatagaggcggttaactttcggcatatcagcgtataacgaagtgtcgaaaaccgccacttgacgaacatctggcaggagctgtttaaaaatttcaatgtagcgggcctgagccgggttatgaagtggggcatattcagctaaattgtggatttcggctaaaacttcatcatcgattaaaaccgagtctttaaagtgttcgccccctgcgacaactcgatgtccaattccagtaatctcacgtaaatgcttgactagtccatgatccttaaggaaagaaagcagcatggtaaccgctaaatcataggtgattgaaggttttactactttataaggatcgtgttggggacgtttaaccgtaaaaacggagttgggaagattgatccggtcaatcaatccagttgcgattattgtttcatcaggaatcgaaaacaacttccatttcagagttgaactgcccgcattaataactaagtcttttttcatgagatattcctcgctaacatgtgtatatttattggaaattagttttttgtatccgcttacaattataccggatttccaacaaaaatacttaactatcgataatagtttttgcgttaatgaattcacgaatacctaaatcgctaagttcacgtccgtaaccagagaatttaactccgccaaatgggaactgaggatatgaagttagtaattgattaatagcaacttggcctgtttcaatcttcgaagctactcgttcagcttgttctaagtcttcggaaaatacggtcccacctagtccgtgttgagaagcattagcaacttcaaccgcttcttcttcatccttaaccttgtaaacttgagcaactggaccaaatagttcctgatcatacatcgggttatctgatttcataccactaatgatgagaggataaaagccagcaccagggcctttaatgggcgtattgttgccccaaagcagtttagcaccgccggctaaggccatgtccacttgttttcttagtttttcttgagcagacttggatgaaagtggcgccaaagttgtttcgggatctagtgggtctcccaaccgacgttttgcaaattgctggctaagaccttcaagaaaggcgtcgtagacatcttcttggatgataaaacgtttagcggccgtgcagacttgtccagcattgctaagacgagctttagcagcaacttcaattgcttttttcaaatcagcgtcttttaagacaacaaaggcatcggttccgcctaattccatggttgattttttcaaatttgctcctgcttcggacgcaatctttttaccaaccccttcagagccagttaaagcaacaccttgaacccgatgatcactgatgatttgactaacttggtcgtaattgataaataaatttttaaatgctcccgttggaataccaactttcaaggtcgcatcctcgaaggcttgagcacattcgggaatgatactagggtcttttagtaagacagggtttcccgcaataaaattaggagcaaagacccgcataatttgagcatacgggaagttccaaggttcaatcataaagactgctccaatcgattggtactcgacgtgggctttaacccctggagcatcgtgatactcaacgtctgccaaagctgctgctccatttttagcatagtattctgcaaaatcagaggtcttttgaacttcagcttgagattccttaaacaactttcccatgttagttgtaataaggcgagcgtaatggtcaatgttatttttaaactcatcggctagctctttaagtttttcggctcttttttcaatgggttgagtttttgcaaattgataaaaaatatcagcattcttcaaagtaacttcgacttcttggtcggttgtattgggaaatgtgcgaattaattgtccgtcgtacggatttactgaatgatatgccatataaaagtctccttttctagatatggttctattgtgcaaaagaatacgctttcattcaagtgataaagcttagattggcaaaattcaatatttgggaaaatacagcacattttatagagtgattagaataaagtgaaggttcagatttgcaaaataaattatcttagcgtagactacagagcgaaaactgaatagatttcttcggggcagggtgtaattcccgaccgacggtaacaaccaagggttgaagtccgtgacccgcgagtagcggtggacctagtgagagtctaggaccgacagtatagtctggatgggagaagaaacgttatttaaatttcgtactcttttgtacgctttttggcgtgcatgctcgtatggagtcttatttagctatcaaaaatcatgccccgcacaaattttgtgtggggcttttttcgtggggtgattttgattagtgaacaagattatatgaatctagctttcgaaatggcagagaaagggaagtatcaaacgtggacgaatcctttagtgggagcggtaatcgttaagaacaacgtggttttagctaaagggtatcatcaccagtttggagctgctcatgctgaaattgatgctttgcagcatttagatgatttaaaacaagccagaggtgctacgatgtacgtcagcttagaaccgtgcagtcactttggtaagacgcctgcttgtgctaaaaagttagctgaagtaggtattaaagcagttatagttgggcaaaaagatccgaatccattagtcgcgggtcgaggacttcaaattttaaaggatgctggaattgaaacaaaagttttgaaccaaactggaggattaaatgttaaatacaattttttctatcagcatcagcgtccatatgtaaacgtaaagtatgccatgactttggatggaaaaattaaccagcaggtcaaccaacgcagtattatcactggtaaagaagcctatcaagatagccagcaattacgggcagaataccaagcaattttggtgggtgaaaacacattaaaagttgatcatccccaattgacggttcgccaaatcgctgtttatcagcaaccttggcgaatggttttgataagggatgtagatcaacttaaagttgaagattatgcgttttttaaaacagcagatccaatcttattacttacttcatccgtaactcgacgacagtggccgaataacgtagaagtgatttctgatcggtggacccccaataaaatcctaacgctactggctaaacgagggattcaaagtgttttagttgaaggtgggagacaaattcacgccgagtttttagcaagcggtctggtggatgaaattaatgtctatcttgcaccacgtatttacggagcgacggggttaccagcgatatttaaccctactcaattaccatatcaatcgaatgcatatcagttagttgaaaaaatggaattggggccagatatgaaatttagactgaggagagtatagatgtttactggaataattaaagcaaaaggcattatcagccagattaaacgcaatcaagcaaccgcgcaaattatgattgccacaccgatgacccaccaaattcatagcaaaattggagatagcattgccatcaatgggatttgtttaacgattactagcattttaaacgaaggatttaccgtcgaagtaatgcccgaaacaacccatcgaacgagccttgcgaatatgaaagatggaatggaggttaatctagaaccggctttgctagccacagaccgcttagatggtcattttgttttgggacatgtagatacaacggccaaattagttaacagggtgttaaatgaaaattcaatcgtcctaacctttgaaattaatcctgattatatagattacgtggtcgaaaagggctcgatcaccatcgatggagtgagtttaacggtttcagcggtggagaagcaactgtttgaagttagtttgattccacataccttacaagtaaccacgctaggtaatttaaaggctaatgatgttgtgaatgttgaaactgatattttaggaaaatacattttaaacgaaaatcgtggtgtaaataatgaaaaatagaataattgaaaaaattgaaaatgctctacaaactttgaaaaatggcggcctcattatcataacggacgatgaaaatcgtgaaagtgaaggagacatggtggggttggccgaatatgttaccccaaaagcggtcaatacgatggttaccaatgctcgaggactgttgtgcgtaccgatgagtgcggagatagctcaaaaattgggattatcaccaatggttactaatgcggaagatgcttttggaacggcgtttaccatcagtaccgatgctaaaaccactaaaacagggatttcagcttttgaccgcgctaaaaccattcaaaagttagcggatccccaagctaaatttagtgaattttatcatccagggcatgtctttcccctaattgctgaagagggtggggtgctagcaagaggtgggcatactgaggcggcagttgatctggctaagttagctggagctcggccagtagcttacattacggaagtcttgaaaaaagacggcacaatggcacgtcgaaatacccttaaatccttggccgaaggaatgcaaatgcccctattaaccattgaagaaattaaaatgtatcgttatatgaaagatgctggaatagttaaatcggttacgaaagtccatttacctactaaatatggagaatttgagatggaagcttttgatacgggggctgggcaggaaccaactttacttttaactaaaggaaatctatctgaagttcaaccctcgttacttcgaatccactccgaatgtttaactggtgatatttttggttccaagcgatgtgattgtggtgagcaattagaacgttccttaaaggaaatccaaagccgtggaagaggagctttgttgtatttacgtcaagagggtagaggaattggtcttgctaataaattaaaggcttatgaacttcaagaacaaggaatggatacagttgaagctaatcttaagttaggatttcaagctgacgaacggcattatggagtagctgctgcaatcctaagaaaaaaaggaatcacgaaagttaatttactaaccaataatcctgacaagattaaataattagaaacgttgggtatcaaggtagaggagcgagtgacaatccaaatcccagcacgccccgaaaatcgaagctatttaaaagttaaaaaagaaaaaatgcatcatttattgaaaggaatggattaaatgacagaatatttaggtagccttaatggaagtaaacttaaaatcgcgattatagtagcgcgttttaatgatttagtgacaaagcgtttactggatggagcttttcaaacattagctcaaaatggagtttccaagaaagctatcgatatttattgggtacctggagcgtttgaaattcctcgcgtagctcaaaaaataagccggaaaggtaatgtagacggaataattactttaggagcagtcgttcgaggcgaaacatcgcattatgaatcggtttgttcaggagtaacaagtggaatcgctcaaatagcgttagaaggaaaagtaccggtaatgtttggggtgctcatgacagaaaatatggaacaggcccttaatcgagcgggtggaaaagccggaaataagggcggtgaatgtgcaatggggctactggaaatgattaatattgagcaaacaatagatggggagtagtgatacaaggatttagttgttgttcaaaaaagtggtctacggaggttgaaaccaatatttttttaaaaaactttagtcctttagaccacggtaaatttaaatatgtagttttttaaaaaatagcgctttcaaaaaccgataataggtaataaaagaaaccattgatgaaaacgagtaatgctgcaatcaaaccgaaggtgaaatccgaatacttaaaaattgaaaaatcgagtaaaggatgcttaagttgtttctcggtacgaataaataggataattgaaaccacggcaatccacagtgctccaaggatgattggatgggtatacccaattgcttgccctcgtaaaatagcaaagaagaaagttacaataaaaacaacaaattctagtgtgcctaaccagtcgaggggcgcattggccgaaacaggaacatcttttggtaaacttttaagtcccaataaaatagcaattattccaattggaacattaatccagaaaatataattccaaggtaagtagttgagaattaaacctccaacggcgggtccagcaactgatcctagagcaacgaaagttccgatgaagcccatcgcccgcccacgctgattgattggaaaggaactagtggtgattccaaagctatttgacatagtcatcgctgctccaaccgcctgaacaccgcgagcaaatagcaaaaatggtaacccaagattgattccagcgattaatgaaccaataataaaaattgccgtgccaattttaaaaatgcgggtcttaccgaccacatctcctaggcgaccaaaaaacatgagtaaagaactaattataatcaggtagatggatacgacccattcaatctgacttgctgtaacagataactccttagacataatgggcatcgcaatgttaacgattgacccatctaatgttgacataaacgtgaacatccccagcgcaattaggattaaggttttgttaaccgttaatcctttggatacattattttgcatatccgtccccccaattcatctcttaaaaattaatacaattaacattgtggtgctttaatgcaaaaagtcaattatttttaattgggatggaccgtagaaggacgaggaaattttgtgtgggttaaataaggactttcacttttaagctaagttggtttaatcagtggcacgacaaaaagtagcaacgtcttataaattaagtcggatgctacttttttgttacgtaagggtatttacagtaattctctttgaactaaagtttcggcgatttggactgcattccaagccgctcctttaagtaaattatcagaaacaacccagagattataaccccctggattttcagcgtcagctcggattcgtccgacgaaagtggattggtgtccttcagcggtgagaggttgaggataaagctgagtacggggatcatcttgcaaaacgatgccatcagcttggtccaaaacggtctgaatttctggcaccgatggattttgttctaattcaaagtatacggattcgccatgcccgacggggacaggaacccgaacacaggttgccgttacttttaaatctgaattattcaagtcgtggcgtaaaatttttttggattcatgaatcattttccactcttcatgggtataaccgtcatcttcaaaaacatcgatttgaggaagtaaattaaatgctaaaggataatgatgagatgcgccactaactggcaaaattttagctatttcagcttgcccatcaagatgttggcgagcttcctctaatagttcactccaagccgattgaccagctccagaagcagcctgataggttgaaacaataatccgatttagaccgtattttcgatcaagcggggcgagtgctaccaacatttggatggtactacagttaggattagcaattatcccgtgatgccaatcaagatcatcagaattgacctcgggaataaccagggggacttctggatccatacgaaaggcactagtgttgtcaatacagaccgcgccgttttttacagcgtggggaattaattttttagaaactgagccaccagctgaggataaaactaagtccaccccgataaatgaatcaggagttgcggcggatacttcatattcttgaccgcgaaaagtttgaactttgccgacggaacggggcgacgcgagtagtcttaaatcacgaacttcaatattagactgttcaagttgctcaatcattctggttccaacggcgccagtggctcctaggatggcaacggtgattgctgacatattatttttcctcctgaacaaattttgtaagccgtcgaacggcttcgtgtaagttggacatggatgctgcatacgagaaacgtaaataaccttcaccaccagctccgaaaactttgccaggaatcacggctaatttagcttgatgggcgattttcaaggccaactggttcgaattttggatcaaattgatgggaattttagcaaaaagataaaaagtcccagcgggcgagcgaacttgaaaatttaattgattaagttcctttacaaggtagtcacggcgtaaccgatactgttcgcacatcttggctacatcgtcttgaccatgtaatagagcctcgatcgccccctccataatactagtgggagcggtggtaaccatgaatccatgtaattttaaaatattactggtgagcgtcgccggagcagctaagaaaccaatccgatagccagtcatagcgtacgatttagaaattccattaataagaatagttcgagaaggtagcagttcggctatggaatagtgcttattatcgtagctgagttcaccgtaaatttcgtctgctaggacgaatagcttcgaattttgaatcacctgggcgagttctgttagcttgcttttagagtaagttgcgccggtcggattagttgggtaatttaggactagcattttggcgttcgggtgcgcttgtaaagcttgtttcaaagcatcggctgtgagtacaaaatcagtatctgaggtatcgatttcaatcaccgtggcatcaattgcttttgcaattgccatgtataaaggaaaggttggagttggaataatcacttcgtcgccaacactcaaaatggtttgcatggtagcaaaaattgcttcggtagcgccgattgtgatcaagatttcactcgctgggttgtaccgaatattagttgagttcagtagatatttactaacagcttggcgcaaacgcagtaagccggccgacggagcgtagtgggaggcattattagtgattgcgttaattaaaacttgtttaacgtgttctggcgtgtttaagtcgggctcacccaacgttaactttaaaattcccgggatatcagacacttgctgatcaaattggcggatggcagagcgactaattgctgagagtgccggccgagtttggttttgtagaacggaatcgagttcaggcatttatagagccccctaatctaagatgttttctagaccaaccactaaggtatttaaattggtcactttttgacaagccagtcgaactccagacatgaaagattggcggtcaaatgaatcttgacgaatggttaaagcctcaccaggtccaccgaagagaacttgttcgtgggcaacgtagcccggtaaacgaattgaatggattggaacaccatcaactttacctcctcgagcaccagggatagtttcaatttcatcatagtcgttagcatgagtacgagatgcgctgatggctttggcggtggcaatagcggttccagatggagcatcttgtttatcttgatgatgcatttcaaccacttcagcttctgggaaatatttagcagcctgcttagcaaattgaattaaaaggacagctgataatccaaaattaggagcaattaatcctcccaactctttagtagctgccaaagtttggagctcatgcatttcggacgttgaaagaccactagttccaacgaccggatgatagccatgggtaattgcatacttaatattttgaaaaacaatggaggggacggtgaaatcaatccaaatgtcagcttgcggaagttcagctagctgattagtgaccaaataatcagatgtttgggggatggcatgtggtgcgtaaccaccaactaactcgaaacccggtaagttttggattaactgaacggtttgttgacccatagatcctgtacaaccagcaatcacaacagttttaacctgatttatcatataatggctcctttcctagtaatgcaactgcacgtcggcaagatgattaacccccagctgatgggctaaattgagcttttctttttgatttaatggcaagataggaagtcgtggactaccaacggaccaattttgagcgtttagaacggctttaactggtgccggtgacggatataagaagagggcttccattttgggtgttaattctcgctgtaattttccggcttttaatagatccccgtgtttcacagcatctaaaagtgctcgtatctgatagccatatatgtggcttgcaaccgaagcaaccccatttgcgcctaaagcgactgcacccagagtttctggatcatttccggtatatacagcaaaatcattgggggtgttttcaactaaaaaaccaatgtcatttaaatttgtacactgtttaattccaatgatatttggttcttgagaaagctcaacaatggttgcattttccatttgaacaccggttcgtccgggaatgttatacatcataatcggaaagtcagcttggcgcgcgacggctttaaagtgcgctaccatcccgcgttgattaggcttattgtagtagggggtaacgactagagcggcaatgatcccgtcaatttggcgaacttctttagtgaagtcaatggtagcttgggtattatttgatccggttccagcaatgatgggtactcgtccagcgactatttcagcaaagcgagtatacagacctaatttttcagcgtgagttaaggtaggtgtctcaccggtagttcccccgataataaaaccagtattgccggtttcaatgagatgattagttaaacgttctaacgcagtaaagttaatttttaactgatcgtcaaatggtgtaataatagcggaaatcaaatcaacattttcaagcatatttaagcccccttggacattcgattttgaagaaatttaaccactgcatcgattcccaattgaatggcacgttcatcgggattaaaggtagcagagtgaagtgaactggtagcgccgacgcccaaccaaaacatggtgcctggaaacttgctcagcaagaatccgaaatcttcgccggtcattgctggcggagtttttttaaacttaatggccgaatcgctttgcatgaattgaattaattcatgagttaaggttggatcattttccactggtaaatacccaccttgattcattttgacctcgacttggcaattaaaggcttgggcagttccttcacaaatttgttgaacgcgttgttgaattagaagaatcattttctgagttaatccgcgaatagtgccctcaatgacggcttgatcagcaataacatttcgaacatttccagcagacacttttccaagggttaaaaccccgccttcgatggggttgacattacgagcaacaacggtttgaagctgagtaattaaataagcttgagcaacaaccatatcatttgcgtcttgtggataggctgcatgtcctcctttgccggttaatttaagattaacttctgtagttccagcaaacagggttcccatgcggcaaccaattacaccagctggcaacgtcggcgtactatggagcccgtaaaattcgtttggtctaaactgattggtaaaaatatttgcattaaaagctcgaaccgatccactatggctctcttctgctggctggaaaaagaagattagattatcttgcggttgatggttagcaaaatattctaagatgcccaaggcaaccgtcatgtgaatatcatgaccacaagcgtgcataatacctggagttttggaagcgaagtcaaggtcagtcttttcgttgacaggaagtgcatcgatatctgctcgatatccaattgttcgatgaggatgcgaaccagcaactcgaactagtaaagcggttggtagttcgggaatggttttaatttcaagcaagttttgcggtagcgagcggatgacgcttaaaagtagggcgtgggtctggaattcttttagggctaattccggtgattcgtgaaactgccgccttattcgaactaaatttaatggttcaatggtcattttaaacacttccttataggttacgtagtccgtcttcaagcgctgttttctgggaagttgtattatcaacccgtttaataatttgagctggtaccccagcaactactgtatgtgcaggaacgtctttggtaactactgctccagcagcaacaacagcaccggttccaacatgaacgccttcaaccacaacggcattggctccaatcaaaacatgatcatcaatttgaacgggttgagcggaagctggttcaattacgccagctaagacggcacctgcaccaatatgacaatgtcgaccaactagagcccgcccaccaaggacgacgcccatatcgatcattgtttcggccccaatctcagcgccgatattaataatagcgcccatcatgataactgcattattgccaattaaaacttgatcacggatgatagcgcctggctcaattcgggcattgacttcctttttgtccagaagaggaactgcagaatttcgactatcgttttcgactcgatagtgtgtgatttgagaagatgattctaatagtgctttaacgtatttccattcaccaaaaagagttccagaagttggtgaaataaaagcttcaatttcattcggtatttgtaattgatatagtttttctccggcaataaacactcgaacgggggtctgctttttggagtttgaaatggtgttaataatggactgggtgtcaagattactcatagtaattcccctttcaattttcaataatctaaatcattttgtatcatatctgcgtatgtttctctttgaataactaattgagcttggctattttcagcaaagacaactgctggacgaggattacggttatagttactagccattgaatacccgtaagcacctgttgccaacataacgagtacatcaccggtcttagtagtaggtaatggaaggtggttgattaagatgtcaccagattcacagaatttaccagctaaacgaacggtttcaatcggaggctggtttggattttctgcaaggaccgcctcatagtcagcctggtaaagtgcgggtcgaatattatcacccattccgccgtcaacagcaacgtaaggggataaaccagggacatcttttcgtgaaccgattgtgtaaagtgaaaaaccggctggaccaacaatggaacgacctggctctatccaaatggtgggaatgggttgtccaagcttagagtactggacttgaagttcatctaaaatttcaccgagaagaagctcgggggcaagaggatcattcgcatgggtatacttaattccaaatccaccaccgatatttaaaatatcggctgtaaattggtatttttgagaccaatttgttaataaattgactaactttttaacctctaatttaaaacctgttacttcaaaaatttgtgaaccaatgtgggcatggattcctcgtagatggattcgagggttgttttgggacaagcgcatggcttttaatgcttgtcctgaatcaatatcaaatccaaatttactgtcagtttgaccggtttgaatatagctgtgagtatgagcagaaacacctggtgtaacacggagcaacacatcaatttgagtattattttcgttcaaaacttgatcgagcaattctaattcatgaaaattatctaaaatgatagttcccactcctttttggacggcaaaattcaactcggcgagtgatttgttattaccatggaagctaagactagcagaggggaaaccagcggccaaagctgtagcaatctcacctccagaaacgacatcggaatgggcatgttcttgcttgacaacttgataaatggctttgcaactaaaagccttggaagcatagctgacgatgccgcgcataccacggtcttcaaattctttttgaaaggcttgaatttgattacgaatcatggtgacgtcaaaaacttggagtggggtcccatattgacgggcaagttgagtagcgcttaggccgcctatggtaacctgattaacgttatttacggtgtataaagacattcgtttacccccttttctaatttaattttcacaaatttataatactaaatgaatttcgtcaagcataaagtaagggggtatatgtcataaattgttgctctaagtagaagtgatttatgaaaaatttatttttttgcattctagtacagaatgagtataataggcttaaattaaaaaagaggttgcggagattaaaagtacctgaggatagaatgaaggattcgatatgccccagcgaaaggatgatccgccgaaatgaacattgacctttctcaatgtttgttgggtcttgagataacatctcaaggactgtcgctatcatgactgatagcggggtgcttttcaaatcagactaatgatttagcgatgttagttaattactagcgcccattttcgtttttttacgaatgggcgtttttattttggttagttggaaagctagaacctcgcaaaaggagactagtatggtaaaagttgttaagtttggtggtagctctctagctaacgcagcgcaatatcaaaaagtaattgaaatcttaagagcagatcccgaacgtcgaattgtggtcgtttcagcaccagggaagcgtttcaaagatgatgttaaggtgacggatctattaatcaaatatgccaacgcatctggggagaacgtcaaagtagcacgtcaagcagtgctagaccgatatcaagaaattgcagatgcataccacgtttctgattcggattttgaacaaatcaatgtacatctaattgatttagcaaatttgcaccacgcaaataaagcatgccgtcttgctcattttaaggcggcaggggagcggttaaacgcaattttaatggcattagttttaaaaaaattcaatgttactgcgcgatttgttgatccgaaacaattgggcataaaggcacatggtgactataataacgcgatcttagaccagcattcatatgctcaaattgaggcagtttgttcaaatttgctggatgaggcggagtatcttgtagttcctggtttttatgcatataaccaaaatggtgaggtatgcactttctcgcggggagggtcagacatcacaggggccattctcgcacgtggtttccaagctcagctttatgaaaattttacggatgtggactccatttattcggctgaccctaaaatcattgcccagccacatccaattcgagagatgacttaccgtgagatgcgggaacttgcatatgctggattttccgtttttcacgatgaagccatcatcccagcaattgaagctcaagttccaattgtgattaaaaatacggatcatcccaatttaccaggaaccgtaattgaacccgaacaaaattatgcttctgatttagaaatcacaggagtggcgagctcaagtcggtttgcggctttgtatatacacaaatatctgttgaatcgtgaagtcggttttaccttgaaattattaaaaattttatatcgttacgatattagttacgaacatatgccttctggaattgatgatttaacaattattttcaaccagaatcaaataacggatgaaattttacccagtttgttatccgatattcgggaagaattgcacactgaccggttagaatggattgatgattatgcaatcttaatggtggttggagagggaatgcgtgacaaggtcggcgttgtagatcgaattgtgaatgctctagcacgaaaacaaattggaattcagatgattaaccaaggggcttctagaatctcaacgatgctcggagttcatcaaaaccaagtaaatcaagctgttcgtgaaatttacagagaattttttaaaaacaaaggtaggcagaccgatgattaaattattacgagtacacggatcagaaaactcatttatattacttgatcaagaacaactcgaaataccaatgaatccagaccagttaattcaattagcaattcaagttgctaataatcaaacagggttgttaggtggggctgacggacttcttgtagtcagttcaagtgaccatgctggcgtccggggacgaatgcaggttattaataacgacggtagcttcgctagcatgtgtggaaatgggctgcgaacggtggctcgttatttagccgaaaaatatgaagaaaatgattttttggtccaaacagatcaagccgatttgcacgtaggacgggtagcaacgattggaaatgggttacccacatatcaggtggaaatttcaccggttagttttaatgctaaaaatctaccaatgcaaattgaaaatcaggataaattgtttaatgcgccagttcgagattttgatgatcagcttcttttttcagccgtggcggtacctaatccgcatttaatagcaattgataataataaccggctttcaactaaaaagttagcggaattgggtcataggttaaatgcttccaatccttggtttccaaagggagttaacgtgagctttggacgggtcattggtcagaatcaattgttcgtccaaacttatgaacggggggttggttttactaatgcctgtgggacagggatgtcagcgacaagtttagtttggagcttgttaaatgatggtcaaactagattgggtgaagtaaatgatatctttaatccaggtgggatggtcaagactcgggtaaatcaaattcatggtgcatatacgattgatttaattgggaatgcgacttttacccaccaaatctggattgatgaggatcagttgcgacaaaataatttggaacaggttcaaattgaatcaaccggggaagaattacattaccaagagtttattcgacaactacctcgctatcgcttttagtgaaataactactatataatataaagattttcagttaacctaattttcagtaaaactgaaacctaagcagattaatttaggactctttggcttttttacactctgatataatagtcatcgactaatgaattataaggagaatgttttgaactggaaaaaaggaactttaggcgcgagcggaatgctcgtcctcgttattttaatcggattgatgttacgaacaccaattaccacgctacctctgatgctaggagatttggctaacaaactggaggtctcgaagagtagtttgggaatcttaacgactttgccactcataatgtttatgttattttcgagtgtcgcctcgaccattttaaaaaagtggggttttaaaaagtcactcctaggtaccttagccatcctattagtgggttcattattacgactcatcgttacaatgccgacgatgatcatcggaaccagtttgattggaatgggaattgcttatttaaacgtttatatgccatcatttgttacagcatatttccctagcaatattggactttatacctcggtttataccttttcgatgatgtttggagtggcacttttcaacgttatcacggcgcccatcatggtgtgggctgggtggtggagcatgctgatagtattagcgattacccctctgttggcattaataatctggttgtttttgatgcctcatctatcagaagaaatccatgagccgcaagttgaagttaaaaaagaagctatgtccaacgatcaaatctgggtgaataaaaaagcatgggcttttctaatcatgtttgggagccaatcgattctaaattacacattcactgcatggatgccatccttgatggcgtaccaccaagtcggatcaggcgtaattggaattatcatggcggctttttcgttgattggcttgccgattaccgtgcttttgccccaattattagttaagtggggacggttgggcaagttgttcttagtaggatctgctggagtgaccggcttaattgcctcaggaatgttatttttccaaaacacttcgtccacaatattttggatgattgaaagtttgctattaggttatgcgattggccttttcttcatgttcgtagtaaccatgtttgtgattaagaccagtaatccttatcgtacggctcagctttcagggatggcccaagcgggtggttatttcattgccgctctgggaccagtgacttatggctgggcctttggtctgaacccaaccggaaatctacaaaatgtagcctttgtggtggccattaccttagcaaccatcatgggagtaatcattgttaaaaccaagaaaatttaaagaaaacctccgaatttcgttttgaagttcggaggtttttatttttgggtacgaattacataagaatccaataatacacgagatataacttgtagggggagcctagagtgaacttcaaaggctggaaaataagttgtttcggatttgaaaccacataattcaattgtagagtatttaccgattgtactatcagcattagtagttattaatataatgggaattttattttttgatgttttctttgcagcttcgattaattcaggggtttcaccgtttagagaaataataataaccaaattgccaggtctaatatctgctgataaagtgcggataatatttggatcatcacttagttggcaatttttattcaagagttgcagttttactaataattcttttgcaattaattcagaaaaaccacgggcaaaaatgtaaatggttttggcatgcttgattctttgcacagactgttcaatatctggaatattaatcattttgatggtgttagtaacttcatgttcgttttttaggatggcacttttaatatcactatcggcacgctctaaattggtaaaatcctttgaactattattctttgctactccatgcttaaaatcactgaaacctgtaaaacctttttttcttagcgcacggataatagtggccgtagaaacgttagctcgttcactcaactcaacaatagataaaaaaggaaccaattctaggttgtcttgaatgaatttccatacaaattgttctgtcgaactcaaattatcatttgccaaaccaatccctccgattgtaaattctttttcaacaataacataaataacaaagtttttgaaaacatttacatcatggatgaggctagaattaggagtataagaaagaggtgcttgaaatgatttatacgtgcacattaaatccagcaattgatttatttattgaaacacaacagttgaaaccaagagtggttaatcggacgaataactatgatattcaggctaatggaaaaggagtgaatgtttcatttattttaaaaatgttaggaattgataatacagcgcttggtgtgggcggcggtttcacgaattctttcattgaggatactttaacaaagaggggaatccccaataaatttattcataccgaccagcctactagaattaacgtttttacaagagtcatagaggaggacacggaatataaagaagtaaatagtggcccccatgttacgaagcaacaagttgccgaactgatgaggatgattgagaagctgacaagtaaagatatattaataatttcgggtagcttttctgaaggtatcaatcctaatattttagttgagattgcaaagttatctaaagttaaaagattcaaattaattattgatacgaattataaagaagttttagatacgttagcatttggtccggaattacttaagccaaatgtcgaagaattagaaaaatggtttggctcgaaaatattgagtcagcaagacttaatcaaatattgtgaaaaattaatagattgtggagcaaaaaatatcctgttatcaatgggaagcgaaggggccttattcgttaataaagatacagttttacgtggagatgcgcctaagggagtagtagtgaatacagcatgttctggtgacactatgctaggaactttcgtagcaggaatgtgccaacaaaagagcttagcagaaaatttgaaatttagtatcgctgctggaagctcaactgcatttaaagcaggattaactgatttttcagacgttgaggagttaaacgaacaaattaagattgaaactgttaggagggatagtaaatgacaaaatatacaattattgcagctactggctgtccaactggaattgcccacacctatatggcccaagaggcgttagaagaggccgccaagaaacgaggagtttcaattaaagtagaaacacatggacaaagcggtacagaaaatcaatttacgcctgaagaaattagcaacgctaaaggagtcattatagcagctgataaagacgttgatattgaaagatttgatggaaaaagattaattaatgtttcagtaactaaaggaatgaaagaaccggatgaattagttagtaagatattggacgatgatgtgccgatataccacagtaatggccaatataataaagaagatcaaatcagtacaactaatggaactttctggcacagtatctatgtagacttaatgaacggtgtttcgcatatgcttcctttggttgttgctggaggggtattaacagctatttcctttttctggggtatcaattctgccgacccgaatagcgctcaatttaattcatttgctcaactgctaaacacgattggcggatttgcaatgaatttgatggtacccgttttatgtgcctatattgctgaagcaattggaaaaagatctggtttagtagttggttttgcaacgggaatgattgcttataccaatggtactggattcttaggaggaattgtcggaggatttcttgcaggatacacagtggttttattacagcatttatttaaaaaattgcctaaatctttagatggtttaaaacaaatttttctatttccggttattggaatttttatttccggtgcgattatgtggtatatgtcggtaccgatgaaagatattaataccggcatgatggcgtttttaaaaggaatggaaaattctagtccattagttttgggattaattattggaattatgtgtgcttctgatatgggtggtccaatcaataaagctgcatacctaactggtacagctttgcttgcacaaggaaattactttttcatggctggagtatctgcggcctgcatagctccgccattagctacaggcttttcagtactttttaaccgtaaagcatactctgaaaatgagcgaagtgctggttatgttaacttcttattaggatcaacgcatattacggaaggagcaataccttttgcggctaaaaatccgttaattaatattccaatttttatggttggatcttccatcgcagcaattttaacttatacaactagaattagcgttccagcaccacatggtggttttatcgttctacctttggttaataaaccatttttatgggttttgtttattgtaattggagcaattgtttcggggctattactttcattagctgatggtcataaagctcacgttggagaaaaaacattagaagataaaagagaagtatcaaatgagcgtaaagtgaatgacgaaagtttagatagtatcctcactgtagataatattaaagttaatgttgatgttgaatctagagatgaactattacggtatctatcaaacttatctgtaagtaacggatatagttcagatgcaaatgcggtatacaataaatatttagcacgtgagtcagcaggatctaccgggatggaaaaaggcatcgctattccacatgctcaagataatacaattaatacgtctgcaatgttagtgctgaaattaaaacaaccgattgaatggaaaacttttgataaccaacccgttgatacggtaatttcgtttttaattcctgaacgtgaccaaggtaatcatttacgatatctttcatcggtttctaagttactaatgcatgaaagttttgttcaagaactaaaaaatgctaaatcggtcgaagaaatagcggcactattcaaaaaataaaaattaaggctacttcagtttaaaatgaaagcgtttgacaaagtggtaccaaccagttaaaataggttttgttgaatggtaccaaccagtacagatgagaagggaagtatttcaaatggaaaatggtaaattacgtggaattaaagcattgtcagataaaaatggtgtgattagcgcccttgcaatcgaccaacgaggatcgttgaaaaaaatgattggcgcagccagtggacatgaagctactcaaaaagaaatcgaagattttaaagtggcgatttcttcagaattaaccccatacgctagtgggatcctattagacccagaatatggaataccagcagcccgagttcgtgatgaaaatgcaggtttattggttgcttatgaaaagacaggttacgatgcaaccgaacctggacgttttccagacattttggatcaatggtcagttcgaaaattaaaagaattgggtgcggatgcggttaaattccttctatattatgatgttgatgaaggcgatgccgtaaacgaacgtaagcacgcatttatcgaacgtttaggggatgaatgtaaggccgaagacatgccattcttccttgaattggtttcatacgacgctgaaaacgacgatgtgaagggcaaggaatatgctgcggtaaaaccccacaaggtaattgaaatgacgaaagaattttcaaaacctgaatatggagtggatgtactgaagctggaagttccagttaaccaagcttacgttgaaggtttcgctgaaaacgatgatgatgtagtttatagtaaggaagaagcagctaagttctacaaggaacaaagtgatgcaaccaatctaccatttatcttcctcagtgctggggtttcagctgaactattccaagaagaattgaaatttgcccacgaagcaggttcaaaattcaatggagtcctttgcggccgagcaacttggcgtaacgccatcgaaccatttgcgggagagagcgaagcagttggccgtcaatggcttcaaacccaaggtaaaaagaacattgaagatttaaatgaggttttagcggttacagcaacttcagttgaagaaaaattgtcaaaaatgatgtaaataaaaaggatgcttcgtagcgaattcgttatgaagcatttttatttttaaatattgaaccctagaccaaaaatacaagttcggttaagtttggtttgtaagcggttttatttatgttatcatctaaggtattaattccaaataaaaaacaaaaaaggatatatataccaatgtataaagaaaaatattttgaagaattgaaaaaggaatttaatagcgaagatgaaattgtaacggaaatcgtcaacttagaagctattttaaatttaccaaaaggtacagaatattttatcagcgatattcacggtgaatacgatggcttaaatcacattttaaaaacgggtgcggggattatccgagaaaagatcaacgattgttttccagaaatgaatgagacagagaaaaacgaattgaattttacggtagcttatccgaagtatgctttagaaaaaaggcaactggaacaagatgcagaagaactaacgcagtggtattttgggatgattacgcgcatgattgggctcactcaattctgtgctagtaagtattctcgttcaaaagtacggaaaagtttaccacccaagtatgcgtatattattgaagaacttttatatgtagaaggtagtccaaaaaacaagcaaaagtattatgaacagattattagtaaaataatcgagctagaccgagcccaagatttgattcagagtttggctggaacgattcaaaaaatggtgattgatcatattcacattgtgggggacgtctttgatcgaggccgcaaatccaaccaagtgttagagcttttagagcacgcccactcgttagattttcaatggggaaatcacgatgtgctctggctcggaggctatgcaggatcacaagcttgcattgccacgttatttagaattgccacgcgctacggttatatttatgatttggaacgggaatatggtattaatttgcgagcattatttactttcgccacgcaacattatcaagctaaccccgccttttatccaaaggcgggtgactttgaccaaaacaacttggatttattgtcccaagttcatcaggcgctaaccattatccaatttaagttagaaggacaagttattaaacgacaacctgaatttcaaatggatgatcggctctttttagatgaagttcagcaaggaaaaattcagttgggagatcaggaatatccgctagaaaatgggtgtttccaaatggttgatgcggatcatccttatgaactcactaaggaagaacaagaagtcattgacagtttgagttactcctttagacattcacctaaaatcaaggtgcatgtgaacttcattttagaaaaagggagcatgtatttaatttacaataataatttgttgtaccatggctgtattcctctaacggaagatggtgattttgatcaatttgaatatcatggtcaaaaatatgctggaaaagatttattaacctttttcgagcgtcacattcgagctggagcagccaagaaaacgagtgatgaagatgatgataccgatttaatgtggtattgctggattggaaaaaaatcgcccctctttggtagaacggcgatgaccacttttgaacgttattttattgctgattcggcgacccacaaggaaggcgacaacccctattttaaattaagagatcgcctttccactgcgcattatattttacgaaaatttggattagatgaacgtaatagttacattattaatgggcacactccagtcaaagtcagcgaaggagaatcgccgatcaaaggtggaggtcaaattatcgtaatcgatggtggactatccaaagcttatcaaaaatcgactgggattgcgggatatacattaattaataactcgtacgggttccagattgtaacgcacatgccattccaaggtattgatgacttgtatgaatcgcaaacgcaatcgactagtttgaaacgaattattgatcgtgatttaccgcgacgcaacattgccgataccacgattgggaccgaattgaagcgtcaagtcgatgatttaaaatacctcttggaaacagatgaaattagtcattaaattttttgaatcgtaagataatccaagtaatgaaggccaatagaccactaacggcaaccatggaccaaaagccaacgctcgtgtgtcgaccgggcaagccgccggtgttcatgccccagaggcccgcgataagggaaggtacggaaataataagcgctgctgaatcaagatatttcattaaatgattcaaatggttactcataatatcggaaaaaagaccgctgattgcgtcaatcaaatcacgataaacttcaactagtttagtgatctgacgttcggcggtttttatattataaatcactgtttcatcttggaggttattggaaaattcatccagtttgaaaaggtgttctaaagcctgatgttgcgtctctaaggtatgttccaaaagaacggtatccttcttaacatttttaagctgaattaattcttgattctgggtagtttgggttgattgctgttcgagatactctaattgaagtttgatatgggacaatttagttcgatagttatcataaatatgcaatagaaaatgggcgataattgcttcagtcgaactaggttggatagcctgggttaggtgatggagttcagcttccgtattagagttttcccgaacaaaaaaattcagttgatgaggactcgaaacaataattaaagggtctaagacaatttcgtagtcagatttttgattggtcatcactaaattacagagacccacaaagtaggtgattttaccgctttcatccttaatcgtggaagtatgtgggaaaacctccggggtcttgattccagctgcaatgttggatggaaaacggttcttttcaattagattttgaagatcattaaagtctttgaatttggtaatttcgaattgattcgaattagttgacatatagagctaatccctctttcgtaaaacggttacatcattgaagcatattactttataaagcaattctattcgattagaatttgaattacaaaagaaagggagtgaattaatgagtaaaccagatttaaaggatccacgaaagttgtatcatacagaagaatttccaaaacaacaacaagatacaccagcattacagagtgagatgcgacctaaaccagactgtggtgaagaaacttacgaaggtcacgggctattgctagatcgtaaagcgttagtaaccggtggtgattcaggaatcggtcgagcggctgcaattgccttcgctcgcgaaggagcagacgttgccatccagtatttccctggagaagattcagatgcgaaggaagtcgcggaatacatcgaaaaagcgggccggaaggcagttttattgccatacgatttccgagacgaaaaggcccctcaagaagtggttgatcgcgtggttgaagagttgggcggtttagacacgatggtgttgaatgccggccaacaaattgcccataaaaagattgatgacctccccgtgcaacaaattagagacagtttcgaagtgaacgtggtggcaatgttggccctagtgaaggcggctaaaccacacattccagcgggaggcgccatcgttactacgacttcggtccaagcctttaatccaagtagccaattgttggactatgcggcaacgaaggcagcaatcgctaattttaccatcaacttagctcagcagttaatcgaagacggaattcgggtaaatggtgttgcaccaggcccaatttggacaccaattcagttagatcacggacagccggaggaagctatcccagaatttggacaaaaatcattaatgggtcgggcaggtcaaccggctgaactagctccaacgtatgtcttattggcttctaacttagcaagctatactactgcccaaatatatggtgttactggtggagaacacatcaacttataaggggaaagccatatgccatggacgaaaaaagattatccagagtcgatgaaaaacttgtcagaaaccgtgcggaataaagcaattgaaattgctaacgcacttttagatgaaggctatgatgaagaccgtgcgattccaattgggatcagtcaggccgaaaaatgggctgaaaatcacgataaatagcaaataaaaaagagctgtaatcaagcggacgtgggagtcgataattcgacgagcgacctttggttatagctcttttaaattagtaactggtatttgaagtgttagtttgagaatcggtgccactgatactaaagttgtaatatgcctgagtattattagtggtacctgcatcgttagtgctgtcagatgcatcggtacttgtctgggcgttagcattagcttgggcttcagcggcagcttcagcttctgactcggatttagcttcggcttcagaagatgctttagctgcactagaagattcagattcagccttggaagcagccttggaagctgattcagatgcagcccgggaagattcagcggccgctctttcggccactgcaatagcttctgcccgtgcagcggcttccgcagccgctttggcggccttagcagcttgtttatcttccttattaatgaccgtcttcaagctaattaacttagtttgttgatcaactgttttctgtgatttttggtttttactcatgtccttaatcaatttttctactgtagtcacgtcaacggaaagattgtttttacgagctttcataataactttatagcgtttgctaagtttatccgccataacgacaatcttgcggacgtcttttaactgtttagtatagttagttctaaattgagcgggtacctttttttgctttaagtttttcaactgatggtcaacctttttagttgtcacgtttaaagcaacgcgagtatgtttattgaaaagatgactgtaatcagcgcgaatatcataagcattttgtgcagctacttgtttggcacgcaaggaatcgatgttcttataatgttttaaactgtcaacatcagacttgagcttatctagcttagtttgagttaccgaatcttttagatcagcgtgacgattatcagtatataactgaccaatttcttcatttaaacgggcggctcggtgggatgaactaaaatgtgaaatccctcgataaatgccaaagattaataagaaagcgacaattaaaccagcgacccaggtgcttaaacgtttaatacttcttctgcgagcacgacgtttgcgacttcgacttcccaaatagagttcgtcatcgacaaaaggctgatggtcctcttgttgcggatggaatcgctccttaagttgttcgatccattttagtactgtattcttcataaacaaaaatcccccagagactagttacttaataactcataatatatgtataattatagtttattatactggttttgggttagatttggatgaaatttattctataaacgccataaatcgtacgcagggtccattaatagttttttagcagctttagtagaaataactgggccatctaatagaatctcgctggcgatggtaaataggtgagcagctaggtcaatcaaggtttcatcaattggtaatagttcgggatgttccttagtttgaattcggcgatcaatctggcaagacacttcatttttaggtttaagaacggtcataccgaagatatcagcaaatccctgcattagatcataagttaattctgaaatatgttgtgctttagttaatttattgcaaatcatagattcagtaaatggaacgtgaacctgaaggcttttcttaccgtcgtcaaaattaagaaaggaaaagcgactatcttcgggatctgcatagagatctcttagtcgatgtgcaaacacccaatcggcagaaccacgggttgttccgttcaaagggaccacatgaaaagtgccaaaaacaatggggcgtgcttgcgtgatattgagatgatcggtcatcgtgcgaataaaaatatcccgacaaggttgggagcgtaaaaaatctcggattaattttctagtagactgatctgtagtatggggcgggcgttctgtatcaataatgagcgtctctccaggaatgttccacgcgctaatatcatgaagatacaccgttgtatcaccacaaatcttagcgtttttaatcagcggtaagttccaattttgtggattacgatcagtaaaaatttgctttgagctgagctgctggaattcatcgtagtagttcagttttagttccatccgaatataatgtcctcctgagaatgattatttgtaaaaaaattaatacgtaaaatagtaccagagagaagtatcgttaacaagtatgattttgcaggtgacatttaataaaagcgtcttctttgtggactctataacgtttgttttaaataaaaaatattttttagaccgattgaaaatgatatggatttattatctaaaaatcgctactaagatagcaaaaatgaaatctataccactttacacgcacggtatcgatagtgctggctataagaatagttgaagtgggtgacaggctaaaagttcatttggcttggaaagcggtgttagaatgggcgtgagatgatatagaaaagtgaatgaaggtgttgtaaatggatatgaatgacctagaaggactcggtcggctagtaatcgcagcaatttgcggggcgtttatcggttatgaacgttcggccagattaaaaaacgccgggattcgaacgcatattatcgtggcgctgggggcggcgttaaccatgctaatttcaaaatatgggttttatgatttgttgcaaagtcgcggcatcggactggatccctcacgaattgcggcgcaaattattagtggaattagtttcattggcgctggaacaatcttggtgcgtggtgaaggagtgaacggattgaccactgctgcgggagtctgggcgacggcggccgtaggaatggcgattggttcaggtttgtattttatcggtttcacggctgctgttttgattgtggcttcacagtatctctttcgcgataacatcatgttgaaatacttgctgaagcgcaagcattttcattgccaaatcatcatgaaaaatgactcgacttcactgaagaccattcaaaaaatgttcaatgaggggggctttagaaaaaatactttttcgattagtaatatcaatgacaatcggattacagtcgagttggaaggggtcttatcagctgaaaataatattgactcagtattaatgcggatagctgaaaatacggcggtggttgaggtccggcgagaagattgaaaataaatataaatgaaaagatttcagcgaaggtgagttatttaccctgctgaaatcttttttaatttatttcattttccgatttaaaatcgccgcaacagtttgttgatagtgagctttataagttttattttgcaatagcatggttgaaaggatatcgatgatataaaccacacccagttgggagttgataaattgagtattatcaacaaattcgctgtattgaacggacaattggtaatcactcatttcggctaagggactatcatcaaaagcagtgatggagacgatctttagctggtgttgtttagcaacagcaacggcttcattgacttcgttcgatttgccagaaacagatagaacgattaggaggtcatctttttgcataatgctactactgatatacatggtgtgactatcagaaggagcgaaagcattaatccccatccgcattagccgttgagataattcttgcgcattgtaacccgagctacctaaaccaaaaataaagacgcggggagcatttttaataagcatcgccacttgatttaaagttttttgattgatacgtttccaagttccagtaatcatttgattgtaaaaatctgtgacctgatctggaagaggtgcattatcaacattttcggtaatatttgaagttgcttcagccaaacctaacttaaattgactgaagtcgggatatcccatctttttaacaaagcgcgttacggtggcggtactaacttcggcctttttcgataaagtattgatattcatctttttgacatcagcgggatgctggatgacttttagagcgattttgcgttcttgacgcgataaagatgggtatttttgctccacaacgtcaatgatgttcataaaaaatcctcctagattaggtttgattagtgttaattatacgctgaaaataaaaaagactggaacttttttcaagtattccagtctttaatacaagggtcctatttaatggcctcaataaaacgagtggcaatttccaagggacgagtaatcgcgccaccaacaacgaccgcgtggcagcctaattctaaacaacgttttagtttttcgggagtatcaatttttccttcagcgataattggtcgcgtaacttgggaacgtaattctttcaaatattcaaaatcatgatcagcaatattcataccttgggtggccggcgtgtaaccacgcatcgtggtcccaatcatatcaaatcccaagcggtctgcctcaagtgcattttcaatggtatcagtgtcagccatcaataatgtattaggaaattctgtccggaattgttgaacgatttccgcaagtttttcatcatggggtcggcgttgaccagttacttggcaagcgacaacttcgacaccagtagctgccacggcccgcatttcctttaaagtgggggtaataaaaacatcggaatcaggataatctgtttttgcgattccgatcatcggtaatccggcttcatcttgaattgcttgaatatccacaacagagttcgcgcgaataccagccgccccggccattttagctgcccttgccatacgagccataataaaagaactatgcaatggctcattaggcaaagcctgacatgaaataattaacttacctttaaccgcctcaaaaaaattatttttcataatactgacacttctcttttatcaaatttaggtgaaatatagcaatattaaatatgtgatttgaaatagtgatttaatcaaagttagttttgtaatagttaacgtttaattcaatcatcgcagtaaatatacaacgagttaaaaaatattgcaatggtataaaatgataataattttcatttggtgggttaatcatctgcggcagtgattgtaaaaatatttttcactttttttaattgtgaaaaataaaaacaaatgttaatatgaaagcgctattaacgatgcgccatagaacggaggaattcggaatggaaagaaattatcttgcattcgatgtcggtggaacgactattaagtatagtgtgattaatgaggatttggaaacattacgatatggcaagtttgacactaaaaagaatatcgacaatcatatcttaaaaactttggaagaagtaaccatgtcgatacaaaaggaaatagaattatgtgggattggagttagtacggcaggaatagttggtaaagacggcagtattcaatatgctggaccaacgattccaaattatattaatacgccaataaaatccgctctatcaagccgaagtaaaacaccagttagtgtaatcaatgatgttgatgccgcattattaggtgaagtttatgctagaaatttagatcaggaggacgtctattgtattgcattgggaaccggaattggaggtgcgcattaccgtcatggagaattgataggtggagcacatggtaagagtaactcaattggttattccttgtttgatattaaaacagggacaaattatgaacagcgagcatcaacgctaactttggaagctcgccttgcggaatataatactacggtggttgaagctttcgaaaaagcaaaacaaaatcaaatgccatttattgacattattaaggcttgggtaaaggaagtagcaagaggtttagctgaaatcattgtactatttgatccaaattacattgttattggaggtgctgtttctgctcagggagattaccttttaggtcttttgaatgagacactaacaaatttattaccacttaatttcaaccaggctaaattaagtacggctaaacagggaaataatgcccagttgattggggcaattgtacctttattgaataataaagcttagagggggaaattactatgcaagtatcaattaatacagcagtttttttaaatcaaattcaacaaggtgctagtcaataccaatgtttgaaacaattagttggagaacctttagcaaatgttgaagttcgcggagaattatttcaaggcgacactcgtgaggttgaactagataaaattgatcaattatgtcaaaaacaaagttgggacttttatttttcaattccagaagaattatttactaatggcaaacttaaccaaactatttttgattacttaaaactttctgaacggcatcacattcgaggtttaaagattggcttaggttcatttgaaaatctagacgaaaattctttaatgaagttgcgaactgctttgcgagacagtgaagtaaaagtaaccgttgaaaatcaacccaatattaatggaactattaatgtatttaaaaataatttgataactttgttaaacaaagtaccagaactaggatacacatttgattcaggaaattggtactgggtgaatgaacgtcctgaagaagcctttttagctttaaaaaaatacataactgtattccatttaaaagatattagggaaaaagctacggtaatgctagataacggagatacagcgtggaaatcattagtaaaaaatttagatagaacaatacctatttttttagaatatgatatcgttcctgatcagttggaacttgaaatgaaaaaagttaacgacgaaataaatttaaaaaatagtttacatttaaaatgtaatcggttacaatgattttgtaatagttaacgaaattcaattgtcacaaaagttgcatgctactaagagcggtgcaagtttttgtggcattttttatttgcatttgagtatttaaaaatgctgtttaagacgaagcacaatcaattacatttcgtagaatacggaggcttctagatggttaaacaaggttttggagctttaaattggctagttttgattgcatatttaattattatgttgctaatcggactgagttttagtaagaagagttccaaaaattcagaagaattttttaaagctagtactagtaatgtgccagcttgggcagttgggttcagtatttttgccacaacattgagcgcaatcacttatatgtccactccagaaaaatcatttttgactaattgggcatatgattttggaaatttagcaatttttctaattactccaattttaattaagtactacatacctttcttttctaaattaaaggttacaacggcctatgaatacttagaatttcgattcaaccctttcttacgtgtatttagcagcattttgttcattttatttcatataggtcgaatcgcgattgtgatttatttaccaactgtagctttgcagtcaattattaacattaacccttatttaatcgcatccttaattacaattctttgtattatttacacctatcatggtgggatggaaggtgtaatttggagtgatgttattcaagggattttactcttagttggtgcagtattaataattttctttgccgtacatggtacacatggcggttttgctactgtagcaaatgatattgcaaataaaggtaaaattctgactaaagctgactttgtttggagtgtaactaagtcaactgtaccaatcattcttttgggacaaatttttaatactttgtatcaatacactgccagtcaagatgtggttcaacgttataccacatcaacggataacaagcatattgctaaatcaatttggactaacgcattactttctttaataacaatccctcttttttacggtatgggaactgtaatctatagtttttatacacatggaggaagcttaccgcagggatttaatacgtcggctttagtgccttactttgttctaacagaaattccagccggaatagctggcttaatcattgctgcaatttttgctgcctcccaagcaaccattgcatctagtttaaatagtaccgctgcttgtctagtgacagatattcagaaaagatttatgaaagataagagcgatgcaatgagtatgaaattgacccgtttaagtattttaatttgtggctttttaggcctactagttacattagtgcttattaaactccacagttccgatatgatcgataattatttatcactctttgggttatttggggtaccgattgctggaatctttgctttggggattttaagtcagcgtgctaatggatttggagctacggtaggaatgattgttacaacagttatttgttatttcatccaaacacatggtgttaatgctctatttgtgagtgtggtcggatttttgggagcgatgattttagggtatatatttagcttgttaaaacctggtcacaaacaagacattactggcctgacattcaggacaattaataaagatgtcaaaattaaagtgaaagattgattaattaaatttgtttataacttttaaaaaattttatttgaaggagaactatataatgattagagatttagaaaaatacaaaggtattatccccgcattttatgcttgttatgatgatgaaggaaatattagtccagaacgggttcaaaaattagctaagtattatttagaaaaaggggttaaggggctctatgtaggaggttcatcaggcgaatgtatctatcaaacagttgcggaacgcaaactagttttagaaaatgtgatggaagctgtgggtggtaagatgactattattgctcatgttgccgctccttcaacgcgtgacagcatcgagttagcaaagcatgctgaaagtattggagtggatgcccttgctgcaatcccaccaatttactttggattacctgaacacgcaattgaagcatattggacaagcatgatggaagtaactaatttagatttcattatatataatattccgcaaacaaccggttatgcactatcagaaaacttatttaaacgtatgatggcaaaagaacaagttattggggttaagaattcatctatgccagtaatggatatcaatatgtggaaattacgtgctggtaaagacaatattgttttcaacgggccagatgaacaatttgtaggtggacgcgtaatgggggccgatgcaggtataggtggaacttacggtgtttatccagaattgttaatggaagcggatcggtgcgttcgtgaaggtgaacttgaaaaagctcttcaaattcaacttaaaattaatgatttaatttcagaattgacatcatttaaaggtaatttatatgatgtgatgaagttaatcttagctaaacgtggggtaagtgtaggacgagcacgtaatcctttaccacatgtagaagatgatgaaatggatcatgttgaggtagtacggcaacatattgatgatgcaattgctgaatttactaaataataaaaaaacgccgagtctccttaaaagaggctcagcgtttttttaaatctgtgaccagacgtccgctcccaaagtagggaagaggggtacgatgcggcctagttgttcagctgtatattggaactcaattgctggtaataaaacgttaattgcatcggcagcatgttcactaacttcagctgctcccacaagatgatggtcttgatcgtaaatcaaggtgttatcaccaattgtttccttatcaacttggcggaaccatccgtcaggaagatgattagttttaatggtgtaatcaggattttgctgagcttcttcgacgctaataccaacctgtgcgatttgtggtgaggtaaagacaatggttgggatggccggatagttgattgcgtcagtagtctttcctgtgaaaagttgggttaaataactagattcaaagatcgcagtcggggtgagcttaggctgttctttatcaagcacatcaccagaagcatagatgttatcaatgttagtttggagatgatcgttaacttcgatcccgttagcattgtaactaacgcctacttcgtctagtccgatgttttcgatgttaggaattcgtccggtagcatccaaaatccagtcggtggtgagggtttcgtgatcgttataagacacggtaaaatgagaaccgtcttcctcaaaacggttcacctgagcgttgtaaatgaacttcacccctcgtttttcgaggtcggcaatgacttgttttacgtaatcttgattaaacttgcgcaacgcccgattatggcgtaaaagtacagtgacgttcgcgccggcagcattggcaatcgtggcaaattccatgccaatatagcccgcgccaataattacgatattttcaggaagatgcttgaggttcataaaatcagtactgtcatgcgtaagttctgatcccataacatctagatggtggggacgtagccccgttgcaatcacgattttgtcagcggtgtagcgctgttgatccacttcgatggtgtgagcatcaacaaattttccacgaccgtgaataatttcgacgtcaacagagtcgagtagaccagtaatcatgtccggcaagccgtcgatgacttcgtgttcatgttctacattggcagtccaatccagttttaagtcaccatttacaatgccatcaaggcgttcttggtggcgtaaaagttgaaccgggttgtccagcgtaattttcgcgttgcatccacggtttggacaagttcccccgattttgtccgcttcgacgatggcgacttttttaccactattagctagtggaaccgccccgtcgaaggcaccatgccccgcgcctaagtacaaaacatcaaattgataactttcagtcatttaattacctccatcctaaatttaggtgaataaacaattaccattgttggcacgagcatagcagaggataggggcgagttgcaagcgattgcaactgaagagtacaaaaaagcaatccttaactttaaatagggattgctaaaaaatatcttactaacgttttaatgatttaatcgatagcattgaaataccaccaatcaaggaaaaaataaatgagacaataaaaattccagaataaccaaagagacttatgacggcagcggctagaaccggtgcaatagcttgtgtaattgtattacctaagttgtaaacacctaagaaaaatgcaacacgattttgatcagggataacttttaagtttaataaattatcaagtgcgttccataagcccattcctaaaccagcagctagggcgtgaagaataataccagtattatttcttaagaagaacagggagagagctgcaattgctaataagatagttgagagacctactggtaatttcagtactttaaatttatcagatagtggtccagcgactaatcccatcaaaatgccaaaaataagcataatcatgttaataagttggatagaagattgagtttgattaccacgatgaagaaagtcgatcattatatataaaatgtatcctgtaattgcaaagtttccaactccctgaaacatttttcctataagagctaggtagtagtcgcggccgatttgccaagaaggaaaaattaactttacattttttaaagaaaacttttctttctttttagttgaggtttcatctaaattagaaggctcatggacaatcaaagttgcaattaatacaccaacaaatgtgaatataccaaagactataaatcctagtcgaaactggctaaggaataaagcaccgataacgttaaatccgttattacctaaagccatgcctagaccaccataagcagaagaagcggtacaccctttccatcttcaggtgcaaagtcaatccaagcaaccatcggcgcaacaatgaaattaagtgcagcttgaccaatcatccaggtgattagtaagaaagagatattagaggcaagtgatgcaccaatcatgcttaacatgaaaataaaagaaccaccaataatccaaggagcacgtttcccatatttagatttagttttgtctgagaaggcccctgcaatcatgttagaaatggttctgttgcaaagttttaaatctactattagataaggtagaataatagaaaaagatagcaggaggaatgacgatgagtcattttaaaggaaagcaatttcagcaggatgtgattattgtagccgtgggctactatcttcgttataaccttagctatcgtgaagttcaagaaatcttatatgatcgtggccttaacgtttctcatacgacgatttatcgctgggtgcaagaatatggcaaactactctatcaaatttggaaaaagaaaaataaaaaatccttttattcatggaaaatggatgaaacgtacatcaaaattaaaggaaaatggcattatttgtatcgagccatcgatgcagatggtttaaccttggatatttggttacgtaaaaaacgggacacacaagcagcctatgcttttcttaagcggttagtgaagcagtttgatgaaccgaaggttgtagtcacagataaagccccctctattacaagtgcctttaagaaactaaaagaatatggcttttatcaagggacagaacatcgtaccattaaatacctgaataatttgattgaacaagaccatcgtccagtaaagagacgcaataaattctatcgaagtttacgcactgcctctaccacgattaaaggcatggaagctattcgaggattatataagaaaacccgaaaagaaggcactctcttcgggttttcggtctgtactgaaatcaaggtattattgggaatcccggcctaaatcatagataccgtaagggattttattctttatttaaaactttgcaacagaaccttagaaattgcggcaacaatcatcccacaagttgagaaaagcgctactaatgaaactttatttggagcatctagtttttgaattaaagatggtaaaaataaactattcattacgatataaggtcctagccaacttgctggtccgataattaagccgggtactaatcttgttagtggtatagaaatttttttcataattttaatgctccttaattaaaatgattaattactttgtaatatttaaaatcagcgaatgaactatgttgatatgcatcaacagccccaataaaattgaataatcctgtaaatccaccaatttcaccgggttctccgttaacaccttcgtcagataaatacttaacatcaattgaattatccaaatttaaccattgtttatttttcaaatattgaaattggacaattccactcttataaatcagcttaatttcgacgtcacggtttgaaattggaacttcactggaaatgaaatccgtccttgtacctaatttagcttgtagtatacgcaatacaattccttgtccatcatctttttgacaaatgcgggcataaatccaattgtttgagtcataatagagcccaattcctgctgtttgtgagtaatgtacaggattaaaattgagctgggtttgcgcaatatagtctagggatgtagctcgtgtagccatgattgaaggatttacttgtgaaaagaatgaattccgaccgtatattcttaggtagccaggatgttcagtagtattaacccagctatcatcttgagtgtggtaaggagtcataaagctaatttcctcagacttttgagcaaaatcaatatttatatcaaaactgtgaaaatcttgttttacgggtttttgatttttaacagaaaattgcatttttgccagattactcttatcttccatttctaaccaattcgaagcggtccaatgcattttttgaagagaagtttctctacccaatgggttcaaagttgttgatggtagaggtctagacataagatgagcaataaaccattctccctcgggagtactgactagtgaaccgtggccagccttttgcataattgaatttggattgtacatttcaaaatgaccggaatcgggatctcctaaagaaaacagatgctgaggagaagatgtaataatgggttcgccagttggattagattcataaggtccaaatatatttttagacctcccaatttctacaccgtgagcgtaacctgtaccaccagctgcaattaaaagataataatagccgttgtgtttatatatttgaggagcctcggcacagccacgagtggtaaatcctgaagttacgcgttgccaatcgcttaaaagatgaccattttctagattgacttcggcgataacaatatgaccgggggcctgataaccaacacgtgtttcccactctaaaatagaaatatagtgttttccatctttatcatggaaaatagaaggatcgaaacctattgaagttatataaataggagtggaccaaggaccaagtatattatctgcagacataatgtatgaatctgagttaaactcacgaccagacatattttgcatgtgggaatatgcaagccagaatttgtgttttttttcatcataagatagatgaggagcccaaatacctgctggtgtgtttgttccaacaagatttacttcatttttagataaagcatgggaaattaatttccaattagctaaatcggttgaatggaatatttgaattgccggagtccaatggaaagtagaagtggctatgtaataatctgcacccacacgaataatagatggatcgggtgccattcccggaattattgggttttggatttgtgtcatgaaaaatacctcgtttaatgtgatttaataatgaataaagcgtttcaatacttagttatgttattatgtaaacggatacaatacaatgggatttaaaaatgatataagaaaaataattttattaagtaagaattgtaacttttgaggggaaactatggaacagcatcacgagaatgtggtttctaatatagatattggaataagattttatgagtcaatagttgataacgatggttatgtccccttccattggcatagtagtattgaattgatttgtgtcttagaggggacactaattttaaaatttgaaggaagaaaacacattattcagcaaaatgaatttgtggtgttttcttcaggtgtagttcatgatgtaacgaatacatctaaccatgctttagtgttacaaataccaatcaaatttatggaaaattactttcctaatgcagatcgattacatttttatacggatcaacaaaaaagaaaaccagaatatcaaataattattaataggctaattgctttaaatagaattaatcaaaaaggagatgagggatatttatttgatatgggcatgattttgcttaatgttttaaagtctttaattttaaactttacagatgaaaaaagcccaattgaaagtaaaatgagtggactgaaagagatactaatatatataaattcgcactataatgaaaaaataagggtggcggagttagctcagcattacggatataatgctagttacttgtcacgcttatttaaagaacaaacagggattacgcttatcgaatatatatatgaagttcgtttgagtaatttatatggtgatttaattgatacagagattcccattggtcaactttttgaaaaacatggtctatttaatcgtagaactacgagagaaatgtgtaaaaaaatgtttggaaggttaccgagaaagattcgtgaagaaagccgcaaataaaatggtgacatcgataaaacatgtactcttagaaattgtccggatgagtttatcgggtaatcttaaaagttatacctaatatacgataaaatcttggtgaaatgttactatagataggggaagtattttaacagagtaggtatagatatggaaaataaatacgacgttgtaaaacgagatattaaagaaaaaatattatcaggacattattctattaatgataggttgccaaccgaagccagtttaatggaacagtatggcgttagcagatatacaatcagacgagcgattggtgatcttgaaacggatcattacgtttaccgtattcaaggcggtgggatgtttgtggatgattggcaaaaatatataaataaacccattgagggaaaaatgattggggtaatttcaacgcatatagcggattatatttttccaaacattattaccgggattgaccgttacgtttctgctgaaggctattcgattttgattagtaacacccagaatgatccgcagaaagaacgtaaaggaattaaaaaaatgatggaaattggcttatcaggcttgattattgaaccgacacaaagcgctcttggaaatcctaatcgagtcttatacgataagcttaaagagacggaattacccacggtattcattaatgcgcactatcctgagttagatttcccgtacttggaagttaacgattatgaggcggaacgccaagtcaccaacaagttaattgggatgggtcacgaaaagatactgggaatttttaaaattgatgatacacagggtgtccatcgaatgaagggttacattagtgcataccaggaacatcgagatttagtgatgttaagtgaaatggtgatgtaccaatcatctgataacatgcacaatgtatttactcgaatcgaaagcattttagcacgtccagatcggccaacagcgattatctgttatcatgatcaaattgccattcgggtgatagatttagtccgctcgatgggattaaagattccagaagatatttcaatttttgggtttgataattataagttggctaaatatatttctcccaaactaagtacagttgaacatccgaaggaaacaatgggtagagacgctgccaagacgatttttgatatcatcgaaggtcgcccctatgaaaagaacaaagtttatgatccagaattaatcattagggaatcaattaaaaagatataagggtttaagtttttaaaacttaaactcttattttttattctaaaaattcatcctaacaaattttaaaaaatgcattgacttgtccgtataaatattcgatgattaatatcgaacttatgaatacgctttcaaaatatgaatgtgtgatttcaaggaggaaaacaatgagtacggaaaagaagattccaagtggatttatttatttctttggttcatttggtggaattttatttggttatgatattggtgtaatgacaggagcacttcctttcttacaaactgattggaacttgcaaaataatgcgggggtaattggttggattacatctgccgtaatgtttggggccatttttggtggcgctttagccggaaatttgtctgacaaacttggtcgtcggaagatgattttgatttcatcgttagtttttgcgatcggctcacttttgtcagcgctttctccacacgatggacaaatttatttaatcgctgtacgtattttcttaggacttgcagtaggtgctgcatcggcccttgtaccggcttatatgtcagaaatggctccagctcgtttaagaggtcgtctatcaggtattaaccaaaccatgattgtttcaggaatgttgctatcatatattgttgactttttacttaaagatttaccagaacaaatggcttggcgtttaatgcttggtttagccgctgtaccagcagttatcctttatttcggagttttgaaattaccagaatcaccacgtttcctagttaaaagtaatgatattgacggagcaagaagaacattatcttacatccgtcctgaaaatgaagttgatgcagaattaaaaacaatcagagaaacagcagctgaagaagaatcagctaatactagctcaacattcttagatttattaagtggtaaataccgttacttagtaatcgctggtgttggggtagccgccttccaacaattccaaggtgcaaatgccatcttctattatattccattaattgttgaaaaagcaactggaaatgctgcaagttcagcattgatgtggcctattatccaaggtgtcattttggttcttggttcactagtattcctatggattgctgacaaatttaaacgtcggacattgttaaccatgggtggaacggttatgggactttcatttatccttcccgctgttcttaacatgttcatcaaagatatgaacccaatgatgatcgttgtattcctatgtatctacgtagccttctattcatttacttgggcaccattaacatgggtgatcgtcggagaaatcttcccactagcaattcgtggtaaagcttccggagttgcatcatcattcaactggattggttcattcttagttggtcttttattcccaatcatgacagctaacatgcctcaagaagcggtgttcgcaatctttggaattatttgtttgttaggtgttctatttatcagaacacgtgtacctgaaacaaaaggtcacacactagaagaaattgaagaacaaggacttggaaaataaattagtttggagattttaaaatgaatttagttgaaatatcaaaagaaattgaaaatggcaatgtatcacttggtattgaacttggttcaacccgaatcaaggctgtcctaatcaccagtgactacaagacaattgcttcaggaagttttgtctgggaaaaccaatttaaggatcaaatctggacgtattcattggatacagtttggcaagggatccaagctagttattcgcagatggctgctgaagtgcatagcaaatatcatcaatcattaacttccattaaatcaatcggaattagtgcaatgatgcatggttatctagcattttcaaaaaataatgatttgttagtgccattccgcacctggcggaacaacatcacagaagaatctgctgcaaaattgacagaggcatttagtttcaacattccacaacgctggacaattgcacatctctaccaagcaattctaaatggcgaagaacatgttaaggatattgatttcgtaacaaccctcgctggttatgtgcactggaaattatctggtgaaaaagtattgggtgtgggtgatgcctcaggagtcttccctatcgatgaaaagacaggctattactcaaaatcaatgctgaaaaagtttgctgaattagaagatgttaagcagtttgattgggatatcaaccaagttctcccagatgtgaagagcgctggtgaaaaagccggtgaattaactgccgaaggtgctagtttacttgatgtaactggaaatcttcaagcgggtagtgtaatggctcccccagaaggtgacgcaggaaccggaatggtgggtactaatagtgttcgcaaacgaactggtaacatttcggtcgggacatcagccttttcaatggtggttctagaaaagcctttgaaatccgttcatcgtgatatcgacgttgtaatgactcccgatggagccccagttgctatggttcacgttaataactgttcatcagatatcaatgcttgggcccaaatctttagtgattttgcagcaagattaggaattaacctagcaccagataagctctatgaagcactcttcttagaagcaactaaagctgatcatgatttgggacatttgattaattatagttatcaatctggtgaaaatattacaaatatcaaagcaggacgaccattatttgttcgtaagtcggatagtaatttcaacctaccaaactttatgcaaactcaactttattctgcgtttgcaccactaaaaattggtatggatatccttagcaatgaagaagatatcaagacggatgtcatgattgctcaaggtggattattccgtactccagtagttgctcaacaagttttatcggatgcgcttaatattccgattactgtaatggctaacgctggcgaaggtggaccatggggaatggcagtcctagcaatgtttgctagcgacagtaatggccaaagcttaagtgattatctagacaccaacgtctttagtaatcctgaaagtatgaccttgagccccgaaccagagggcgttgaagcatatgacgaattcactaaggaatatgtagcaggcttaccagttgaagctcaagctggagaagtaatttaggagggataaggttaatgttagagaagttaaaacaggaagtttacgaagcaaacatgcaacttcctaaattagatttagttacctttacttggggtaacgtttcaggaattgaccgcgaaaaaggtctatttgttatcaaaccatctggagtcgactatgacaagttgaaaccagaagatatggtagtagtaaatttgaagggtgaagttgtggaaggtgaaatgaatccttctagtgacacaccaacgcatacggttttgtataacgaattcccagaaatcggtgggattgtacatacccattctccatgggctgtttcctttgccgctgcagaaattgatgtaccagctttaagtacaacccatgctgatacattctacggcgacgtgccggtaactccggcactcactaaagaagagattgaaggcggttatgaagaaaatactggtaaggtaattgttaaaacattcaaggaacgtaagattgatccagaagcagttccagctgttttggttagccaacatggaccatttgcttggggtaagacacctgacaaagcagtttacaatgcaaaggttttggaagttgcttcagaaattgattaccacgctcttcaaatgactagaagaaatattgaagttcctcaatatttgttagacaaacattattaccgtaagcatggtaagaatgcctactacggtcaagaaaatgctaagtctaaagaacatgcagcaagaaaataaaaaaactaaaaaataaggagatttttatcatgaaaaaagtacaagattatgaattttggtttgttacaggtagtcaattcctatatggcgaagaaacactacgctctgtagaaaaagatgcaaaagaaatcgttgataagttaaacgaatcaaagaaattgccttacccagttaaattcaagctagttgctacaacagctgaaaacattacagaagtaatgaaagaagttaactacaatgataaagttgccggtgtgatcacatggatgcacactttctcaccagctaaaaactggattcgtggtacagaattactccaaaaaccattgctacacttagcaactcaattcttgaaccacattccatatgacacaattgactttgattacatgaatttgaaccaatcagctcatggtgaccgtgaatatgcattcatcaacgctcgtctacgtaagaataacaagattatctcaggttactggggtgatgaaggcattcaaaaacaaattgctaagtggatggatgttgctgttgcatacaacgaatcatacggtatcaaggtcgtaactttcgctgacaagatgcgtaacgttgctgttacagacggtgacaaaatcgaagctcaaatcaagtttggctggacagttgattactggggtgttgcagacctagttgaagaagttaatgccgtttctgacgaagacattgacaagaagtacgaagaaatgaagaatgactacaactttgtagaaggtcaaaactcttctgaaaaattcgaacacaatattaagtatcaaattcgtgaatacttcggtttaaagaagttcatggatgaccgtggatacacagcattcacaactaactttgaagacttagctggtttggaacaattaccaggtttagcagcacaaatgttgatggctgaaggttatggatttgctggcgaaggtgactggaagacagctgctttggaccgcttattgaagattatggctcacaacaagcaaactgtatttatggaagattacacacttgatcttcgtgaaggtcatgaagcaatccttggatcacatatgcttgaagttgacccatcaatcgccagtgacacaccacgtgttgaagtacacccattggacattggcggtaaagaagaccctgctcgttttgtatttacaggtatggaaggtgacgctgttgacgttacaatggctgactatggcgacgaattcaaacttatgtcatatgatgttactggtaacaagactgaaaaagaaacaccatatctaccagttgcaaaacaactttggactccaaaacaaggttggaagcaaggtgctgaaggctggctaacacttggtggtggacaccatacagttctttcatttgcaattgatgctgaacaattacaagaccttagcaacatgtttggtttgacatacgttaacatcaaataatgctttacagtaagatttaaatcttaaaaataatttattcaatgccacgaagtagaaatctttcgtggcatttttggtggttaaaaaattttttgagtatacataattaaagaaacaaatgtttttttaagggagataccttttattttggttaactttgtgcaatactacacatgtaaataattaaattctaaggaagtgtctttatgaaaattgctgtaattaaggagcaaaaagaaggcgaaggacgggtagcagctacacctgaaaatgtacaaaagatggtagaagctggaaatgaagttcttgtggagcgcgatgcaggaattggtgccggattttccaatgaagaatttgaaaatgcaggaggaaaaattgtttctcatgcggaagcttggaaggctaagttgtgtattaaagttaaggagcctgacgaagaagaatatcaatattttgaaaagggtaagattgtttggggcttccagcatttagcctctgcaaaagctaccgtggaagctatgatgcaagcaggagtaacggcaattggtggtgaaacgattgtcaaagatggaaaactagaactgttagcaccaatgagccaaattgcagggcgccgctcagtaatcatgggagcatattatttagaagcgcaacatcaaggcgctggtattttattgtcaggaattccaggtatgatttcagcgggtaatgttgtaatttttggtggcggtaacgccgctaccggtgcagcagatacagcactgggattaggttgctcagtggtaattattgaattgaacgaccagagaattcaacagctccaaaaattatatgaaggtaaaaaagttcgagtcgttaagtcaaatgaagcaaatttagcccaagaaatcaaaaatgctgatctatttatatcgaccattttgattccaggttctcggccacccaagttggttaaagaatcgatggttaaaaagatgaagaagggctcagtcatcgttgatattgcaattgatcaaggcggaacggtagaaaccattgaccatccaacgacgattgacgatccaatttttattaaagatggcgtaattcactatgctgtacctaatcaaccaggagcagttccacggacatccacgatggctttggctgccggtaatttagattatctattggaaatagccgatcaggggattgaagctgctggtaaaaatgatccagcattagcatctgggattaacctgtatgaaggaaaaattactaatcaaggtttggcagactccttgaatcttccatatactgaactgaaactatagaaaaagggggtggcgttgatgttagtagagaaagaacccagaaaccaagttgtagcagtaactgataatttattaaatctaaatcagattgaagaagcccgcgaggttattaaaaaatacgcgcgacggacaccgttagttaagtccatgtttttgagcaacaacgttgtccatggggaggtctatttaaaattagagaatatgcaattaaccggttcttttaaatttagaggggcgaataacaaaattaaccacttgaatgaagaagaaaaacaacgaggtgtaattacagcttcggctggaaatcatgcgcaaggggtagctttgaccggtaagctgctgggaattaaaactacggtagtgatgccggatgaggcgccccaaatgaagcgcgatgcaacccgaggatatggagcggaagtagatattcatggcgcaacttttgatgacgctcacgaatggatgcgagaaagagctgaaaaagaaggaaaaaccattgtagatccgtttaatgatgctttaatttgtgctggacaaggaactattggtttggaaattctagaagatttagtggatgtagagaccgttgtagtaccagtcggaggtggtggtctaatttcaggaatcgccacggccttaaaatcgatcaacccttcgattcatatcgtcggagttcaatcggaaaatgtgcacggcatgaaggcgtctgttgatgcaggcaaaattgttaaacatcaccaagattttacgctagcagatggaactgatgtagcaaccccaggtgatattacatttgggattgtttctaaactagtggatgagattgtcttggttagtgaagaagaaatttcaaaagcgatgaaagatttaatgcagagaaccaaggtggttgctgaaggagcaggggcattgccaacggccgctttagaagcaggtaagattgatccaaagtggactaaaggtaagaaggttgtagctttagtttccggtggaaatgtggatttacagcgagtttcacagattattgatcacttctttactcctgttgatacgcataaaggtgccattgggtaattaatattttgtgtgtgaaagagggaatcaaattggcaaaaaataaggagcaaaaaagcggtaaacatgtaccgtatgtcactaaaaagcaacggggtggtagtccagccatcttaatcatggggattattttagctattatttttggtgcatcaacggcttattcagggatgaaagctggattaacggtcgccgcaggaattccaggttcaattattggatcgggattggttagtatttttgccagaaaaaaagggattttaggcaaaaatatactgcaaggcatgtcaagcggtggtgaagccattgccagtggaatgatttacgttttaccagccattattttaattggcgggcacgttaatttttggaccggaatgatggtgggaattttagccgtgttatttgccattgggagtgcttcgttagtacaaaattatctaattgtagaagaacatggacgtctagcttatcccgaatcaatggcaattacggaagcgttagtggcctcagaaagtggtggtgattcacttaaattcttagggattggtttcggaattggtggtttgattaccgtggttacgacccaagttttcgggtggctaaacaatatgattacttacaccggaaattcattttatcgttggaaaatgtctactgaagtcaatccgatgttagcaggaatcggttttgtagttggaattgatgtagctttaacgatgtttgcgggatcgattctttcaaattttgcggtagttccgttggtaagctactttacccaaatggctggcggaagtgctcatgtttggaataatgcagctttgcatatttcacaaatgggtgtggatgatgtcgctggatcgtacgttaaatatattggggccggaatgatgctttgtggaggaatcattggagcaatcaagttgattcccgtaatctggacttcgattaaaaaagtaatcaacgctcgcaatagcgctacggaagaaaagaatgccctaggtgtgattgcattgatgttgtcggtaattttaatttttgtcgctggttttattatttcaggttcatttttagttgctcttattggtggaattctttcactattattagctttattatttgtaattgtttcggcccgtttagcaggaaccatcgggtgctcgaacgcgccggtgtcagggatgactattgcttcattggtaattatgactttggcctttgtatcaatgggatggacaaatcagaactacagtgaaaacttattgctatttggggttttcattgttaccgcaatctcggttggtgggggttatatgcaaacccaaaaagttaactatatgattggtggttccaatcatgagatgatgaaatactacatgattgccggaattgtgggggtatttacggtcgtaggaacaaccgtgatcctagctccacaattacaggtgaccggttctaacccgccatttggattaccccaagccaatttgattgcaacgctaacaacgggaattatgtcgggaaatctaccatggattatggtcattgtcggaatagtaatggcgattgttctatggatgctagatttaccaattatgacagtggctttaggtttctacttaccaatttcgactacttccatcattttagtgggagcattgcttaaattgattgtagataagacgactaagggagaagcgttaaaagctaaaagaatccaaagtggtgtcagtctttcttcaggtttaatcgctgggggctcaatcattggtttgattggtattattctacacgtgactggtttacttaaagatgtatcacctaaaggttttgccgccggaaatgcgatgggaatcataatcttaattgtattagcggttgccattgttgtaccactttacatgattaaaaaggtagaagatcggaaaccaagtgatgaaaacgagggatgagcatcagttaacagatgatgaattacgggagattgtatttgaaaagaatccacgagtggactacgaactaaaacaaggaattattacaattattaagccacaagatcattggatacaaagatttttccgcaagcttaattttaaaattcccgaaaatacttatttagatttggacgaatatgggagcttcgtatttcaacaagtaaatggtaagcggagtgtctatgagattgggcaaaatttaggtcataaatttaccgaagctaacgagtatttatacagtcgtttgtggttatatttaaatcatctggaagaaaacgaacaaattattaaacggatttcttaaatttacgaaggagaatattatggaagatcgaatcgaattgtcagcatgtacctcaatcatggtaggaaaagcagcttccctagatggagcgacgtatatttctagaaatgaagaccgcctaattgctattcatccaaagcgttttttggtacaaccagcagttagcgggcgtaaagaaacttatacatcgccctacaatgggttgacggagcctttaccagcaaacggttatcgttatacttctacgccgaatggggatgaaagtgatggtcctaatgaagaggacggctttaacgaaaagaacgttggtgaaagtgccacagaaagtgtttatgcaaacgaacgggtactggcttatgatccatttgttaaaaatggattggcagaagattcaatgactactttggtattgccttttattaattcggcgcgcgatggcgtacgctatttgggtgaactggttaaaaagtatggttctgccgaaggaaatggtgtccaatttaatgatgcggatgaagtttggtatatggaaattgtgaccggtcatcaatgggtcgctgtacgaattccagacgattgctatgccgtggcagctaaccaaattgctattgaggatattgattttaacgatcccgataactacatgtggtcagaaaatattcaaacatttgtggaagaacatcatttgaatcctgatcgagatcgctggaatttccgtcacatttttggaacagatactgaaaaagatcatcattacaatactccacgggtttggtttgcccaaaggtacttgaatccagaaattgaccaggatcctgaatctccagaactaccatttattcggaaggctagccggaaaattgcagttgaggatattcaatatattttgaaatcccactataacgaaactaaatacgatcctctcggaagcggaagtgaacacgatcgcaagacttatcgggccatttcgctatcgagaaccgctaattcacacattctccaaatgcgcgatagtcgtaaaaatggtgctgccggggtgcaatggattggatttggcgtgccaagtttctgtccacacgttccgttctttacgaatgcaaatgatacagacgtttcatatcgagaattacctgaacaaatgtcgttagacagcgcctactggctatatgaaacattagcaatggtcgttgaatcgcattatgcggaatttatccaagcggacctagattatcaaaaggaattatcacagtgggcaagaacgaagattagtgaggttgaccagcaagctgaaagccttgagggagccaaacttacggactatttaactgaacaaaaccacttaattgcccagcattataatgatgaaactaaaaaacttctagcagaactaacgaaacagggagcggaattgtcgaagttgacgtttaagatggatcctaatttgtagtaaaaaatctaaaatattttcacagtacaaaaacatattatcaacgcttttaaacgattggtgttagagcaattgtagaagcaatgataatgtgttttttatgttacattaatagcatattagaaattaaattatatgaaagcgcttgcttattttttataatggccttatactatgtttgtggttgttatatcaatataacaagttggtgataagggatgaaaagacagccgctctggcaatataaacaaataagtacggaattaattagaaaaatagaaagtggtgaattagtagttaattccaaacttccgtcagaaaaactactatgcgaacaatatgacgtcagtagaattaccgttcgtaaagcgttagcagaattagaagagaaacactacataataagacgccaaggccaaggcagttttgttaaagcacattttgaagatgcaggtattagttacattgataacaatagcgaagatctgcgtcgattaggacactcagtttatatcgaattacatgaattttcgatcttagccgatggtgaagagacgaaggtgagaagaattatgcaaatgaataatagtgagtatctatatcgggtgaatcaagtctacatatcagaccgtagacctattattcaacgtgagacgtttatgtcctttgctgattttccgttattaacttctgcagagttacaaaatacggaattaatgccattacttgccagaaaatttgatttaaatttaaagcgtttacaccatgagataagcactgaagtggaagatataccttctagattgtatggaataccaaatacttcaccaagagaatcttatatcaaagcaaaaactacgtatactaatgaagaaaatcgtactgtttacttaagtaatgctacaacagcagcatcttctaaagtattctttgtacggcataaggaggaaaatgttatgtcagaaccacatattttacttacacgaattgataaccgtttggtccatgggcaggtcggagtaacttggactaaaactttaggagcaaatttaattttggtagcaaatgatcaagcggctcaagatattttgcaacaaaaactaatgaaaagtacagcagaatcttcaggagcacagattagatttttcaccttacaaaagacaattgatgttattcaaaaagctgcggatcgtcaaaaaatttttatcgtggtaaaaacgcctgaagatgccctaaccttaattaaggggaatgtgcccattaaagaattgaatgttggaaatatgcattttgcacctggaaaagaagagattactaaaaaggtatatgttgatcaaagtgataaagacgccttaatgggtgctgtaaacatgggagttaatgtatatatacaggatgttccagatgatcataaaaccgaagttaacttttaatatttagtttataaaaatactaagggggatttgacatgtcgataactttaatacaagggctaatgttatcaatatttgctgtgatagcaggtcttgattcatggctagaagttttatacatatttagacctatcataagttgtactgtagcaggttttatcttgggcgatcctacattgggtattatggctggtggacttactgaactaacttttgcgggattgactccagctggtgggacacaaccacctaacccagcagtgtgcgggataatgactgtagttattgcgcatactgcaagtgtaggaccatctacggctattggtttatcattaccattcgcaatgttaatgcaatatattttattgatgtgctattcattattttcagtattcatgccagttatggataaagcagcagccgaaggaaataccaagaaatttgcttctgtaccatatttaattatggcaattgtaggagttttattctttgtagtaattttcttatcagcctatgctgctcaaggacctatgcaagctctagttaaagcaatgcctgtttggttaatacatggttttgaactagcaggaagtgcattacctgcggttggttttgcaatgttactaaaagttcttttacgggtcgaatatgtaccgtatttattacttgggtttgtggtagcaagtttcattaacttctcaaacgtattgccagcagctgtaattggtattgtatttgctatgattgagttctttagagataaaaagaataaacaattacaagaacaaattgaagctcttaaggaagctggtataaatggaggcgaagaagatggcatctaacgtagaaaatactaagaaaacaagcaagttaagcaaaaaagatattactatgctaggaattcgctcttcattattacaatctgctttttcttatgaacgaatgcaagctggaggatgggcttttgcccaagttcctatttggaaaaaaatttttggtaatgataaaaaggcattgtctgaagccatgtctgataatatggaattcatcaatactgctcctccattagtatcgattttaatgggacttttgactagtttagaagaaaaaagagttgatcgtcaaactatccgaggattgaaaaatggattgtttggtccaatggctggtattggagatgctatttattggtttactttgatgccgattgttggtggaattgctgcctcctttgcttcaaaaggtaacattctaggaccaattatctttttcttagtctatcttgcaatcttcttgtgtcgaatcccatttgcacatctaggatataacttaggtgttaaagcaattgatgtaatacaagataattcgaaaattatagctcgtgtagctacaattatgggactaactgttatcggagctttaattagccaatatgtggcattatcacttagtgtaaaaataggctctgtatcacttcaaaaagatttcttggataagatttttcctaatattttacctctaggatttactttcttcttatactatttgttgaagaaaaaagtatcgccaattgttttaattgtaatagtttttgtactttgtattgtatgttcatactttaagattatgtagaggtattaaaaatgacaaaaataaatacaattattacgggacatggtaattttgcttctggaattgggagttcacttaaattactatctggagaacatgacgaaattacattagttgatttcattgaatcgatgagtgaattagatttgggggagaaacttgctaacagcttacagcaagatataccaacgctctattttactgatttagcaggtggaacaccttttaaagaagctataaaaatatctattgataaatcagatgttgaagttgtttcaggatgtaatttagccgcattgttagagactatgttcaatgattatgataatgtacaagcttatgctaaagatttagttgaaataactaaaaaaacagcggatttagcagattttagtacagatattgaagaagaaaatattgaagatggaatttgataatttctaaaaagagtagacgaaaatgtctactcttttttaaataaaaccattttctttgctccatttacgagcttcaaacataatgcgttcttggtctaaagttaatacttcacgattacgcatgataaatttaccaccaatgatcatttcagtaacatcattagcgttcacgctctctaacaaggtgttttgccaatttccactaggatagaggtgaggttgattgatattgataccgattaaatcagctttatatccggccttaatttttcctaaggatccttgctcatttaaaatttgagcgccattggtgatggtcatgtcaaaaattcttttagagggcataatgttaggaatatgtttttgaacaccgtgacgaagggtcattacagaacggaaaattttcatttcattccaaagactcagccctccatgcgcagcgccgtcagttccaattccagctggaatgtgatgatccagtagttcgggtgtatcaggaacacctttaccagcattgctaaacgggcaatggcaaatttttacgtggtatttttgaataattgctttttcatgactggtaagaaaaatgctatgcgcaccgataaaacggggacccaagacatctaaactttctaggaattcgtaagggtgctgcccagttcgaacgataataccttgtacttcagcaggatattcattcatgtgcgcttctaaaaaggtatggtgtttcttagccatatctgcggcttttaaaattaattcatcagaacaagcgtttaatgctcgtagagaatagtaaactttcaaattactaatagtgttgaaattatcatacaattcattattttgttgaattgcttcgtcagcattcattctaattgcggatggtagagtggggtcgtccatcgttgaagaagacaatgccccacgtaaaccgctttgagcataaactgaagcagcactcatcatgtggtagcttccggattcgacgaaaccggttgtgccgctggtgatcatttccaaggcagcaatctcagcacttaacttcattttgggctctgttaattgagtttcgaaaggtaacataacgcgcgtccagatgatgggtttagcatcgagaattcggccacgcagcaattgctgaccagtatggacatggctatcgattagtccaggcatgaacaaataattacgtccatcaacaacagttcctttaaagttagtagaatcaatgtaatggttcacgttttttatgtatccattttcgattagaatatcttggttttcggcaagttcgccgggttgaactaatattaaagtgtttttaattttcttatcaagtaatttcgcctccatgatagatatggaattatattagtctcttacttacaaaaagtaaactttttatttataacctaaccaaggagataaaattttttaatacttcgaggctaggatttggataaaatacaacctttgttttgtcatcacttgcatcaagttgcaaaagttagctgtaaattttgttaataaatatgaacaattaaatttaaaggaaatatgggattctgaattaaagaaggtgtagatccggaagtataaataatttccctaatttacttctttaacaaggggggttaatctatttccattgatgaatcttaacgttatttttttataggaggtatttattatgagtatgaacggtgcagatttaatcgtagacacgttgataaagaacggtgttaaatatgtcttccaattacctggtggtaaacttggtcccttattaatggctttaaagaagcgtgaaaaagaaattgaagttgtaacggtaagacatgaacaaaatgcaggttttatggcacaaggaattggtcgtattactggtcgacctggcgttgtgatgacaacctctggtcctggagctttgaatcttgtgactccattagccacagcaacctctgacggcgatcctgttctagcgatttctggtcaagtaccgcaagccaaattgttaacgccttacccacagaaccctaacatttcaggcgtgatgaatgattcaactataacaaaatatgcaaaagaaattgaagatacaggcgctcttgctgatgaagtagcgaatgcatatattacaagtatcaatggcaatcctggcgcggtatttatggatgttcctggtaatgtattactcaccgaaaccgaaaaagaaggacttgaatttacggctattgcagatcaattagctaatacgattagtgatgaaaaaactatttctgatacagtaggtaaaatcaaacaagcaaaacgccctgtaactattgtcggcgctcgtgcgatggatgaatcggctgccaaggcaatccaagctttcgtaagaaaaactggtattccagtggttgaaacctttgaggcaacaggtttattgactcatgagtttaatgaaaactatgtcggccgtgttggtttgtttaacaatttgcctggtgatgaattagtctataatagtgacttagtaattactttaggtttaaatttagttgaatattgggcttcagtatggaattctgacaagaaaactgtggttgacattgatatagtggtagatcacttagatgaaacttttatcccagatacattagcacttggtaacattgctaaaaatttaaaaaacatcaccaaaacaatttctgaacaagacatcacagatgaatggaagtctactgttcatacattacaagaaaaattactgatgaaaaaacaagttcctaaaacaatttctagtgattcgttgcacccattagaaattgttagttcgttacaaaaagttattgataaacatccagatacaactgttgtgatggacggtggtagccacgaagtttggatggggtcttacttaaatgtttatcggccgaaacattttttgatgtctgatggtcagcaaacgcttggcgtaggtcttccatgggcaatttctgctgcattccttcgcccaaatgaaaagattttgtcttctggtggcgatgggagctttatgttctcatcacaagaattggcaacagttgcacactataaattaaatattgttcaagtaatatgggttgataaggaatataatatggttgaattccaacaagaactagattaccaaggacaagaagaaggcgttgatatcgactacatcggttacaaagaaatggccgaaagctatggtatcaaagcaagtcgggttcattcgaaagaagcattggacgcggccctaattgaagcttataggacaactgaaccaatggttatcgaagtgatagaagacaataaacaaaatattcacttgcgtgacaaagacgaactaaagaaatattaataattataactgaagtaatttagtccctaaccaagcccgttaattctggtacgttgtaagggactttttttgaaaaagtgcctttatctttgatgactgttactcatacaaagatatttaccaaatttctataaagagatgtattgatgaatgttgaattctttcttatactttcactgaaaaaacattctatattaattacagaaattaagtattatttatcatttgaaatattcattttccttattatattcataaaataatgaataaatacattttggagttagattaaaaaaataactaattaaaaattagcttatataattttaaaaatttatccaggaaatactactttgtgattaaataaacagtaacttatcaaggcaaacaccctatataattaaattatgatttaagtacaattagattttaatgatacgtaaatgattcacctatacttctgctataatattatttatatgtaatttgtttttattcataaatatagttaggggtagattcactatgggtgaacaaaagaaaaaactatcgcttggcgctttagttttgatgatttttacaaccatttttggttttggtaatactccaacagccttccaacaaatgggttacggagctatcttttggtacattgttggtgccattttattctttattccagcaggtttgatgtttgctgaatatggttccactttcaaggaagcaaaaggtgggatttattcttggttagaaggttcaattggtgaaaaatgggcctttatcgcaaccttcatgtggttagcttcatggctaatctggatggttatgattgctcaaaagatttggattacactagccacaatcatttctggtcatgacacaactggtagttggtcatttcttggacttaactcaactttaacagttggactgcttgccattctatggatggtgtttgttacttgggcaacaactcgtggaatcaatactttggctaaagtgtcttcccttggtggtattgctgtaatggttatgaacgttatcttgcttctcgcaagtgccttcattttaatcgctaatcatggtcaccttgcccaacctattcaccatttgagtgattttgctacttcgcctagcgcacagttccaatcaccaatcgctttaatttcatttgttatctatgcaatctttgcttatggtggtttggaatccattggtggtgttacggatagtttggacaagccagaaaaaactttccctaaaggaattatgatcggtggtgtggttatcgccgttggttattctttagcaatcttcctttggggcgtttctgctaactggaacacagttattcttgctcaaaaagctaacctgggtaacattacttatgtgatgatgcaaaaccttggtttggaattaggtaaagccatgggtatgagcccagctgctgctgcaatcatgggaactaccttctcaagatttgcgggtgttgggatgttatttgcttatgttggttcattcttcgttcttagttactcaccattgaagtcctttatcatgggttctcctaaagaactatggccaaagaagatgactgagttaaacaagaatggtatgcctgccaattcaatgtggctacaagctatcgttgttattgtatttatcgcaggtatttcaattttagcttcaattactcacaaagaagctactttcttctacaacgtacttacttcaatgagtaacgtatctacaactttaccttacttattcttagttggtgcctttccattcttcaaggctaaagaaggactcgatcgacctttcgaagtttatcgtagtcgtccttggatgttaacgattgttacagttgtacttctaactgtcggaattggtgtggtatttactgctatctcaccattcatctctggtgacttgtttacagggttctggacagttgctggtcctgtattctttgctattattgcttggattttcttggttagaagagaaaaaaataaaaatatctaattaaaaactaaaagatgagggttcattttaaatgaaccctcatcttttttatttccaatattttttctgaaattctgatcgtccacccgcttcttgaatttggtaacgaaggggatttttcttataaaattcttggtgttcttcttcagctggataaaatggttgagcatcttcaattttagtaacaatagggtcatcaaacatttcagatttggctaattgttccctagatttttcagcaatttcacgctgttcagcactattcacaaaaattactggtcggtaattatcgccacggtcctggaactgccccattgcatcagttggatcagtttgttgccagtagatttggactaattggcgatacgaaataatttccggatcatacgtgattttaacggcttctgtatgtcctgtagtatgactagtaacttgttcataggtcgggttggcgacatgccctcctgtataacctgaaacaacgttgataataccaggttgagtttcaaaaggttctaccatgcaccaaaaacacccaccggcaaaaatagcagtttcttccataagtaaatcacgctcctaattaaatagtttctttaaataacctagattatgcgcttctaaatcgtcatatgcaatgaatttcagggcagccgaattgatacaataacgatttccaccttgatcgagaggcccatcatcaaatacgtgtcctaagtgagagttagcatccttgctgcggacttccactcgttccatgccataagaagaatctcgatgattaaccactaatttagggtcaataggcttggtaaaagaaggccaaccacagtgagcgtcatatttatcggtggaactaaaaagtggctcaccactgacgacatcaacgtaaatccccttttggtaaaaattatcgtatttaccggtgaaaggatgttcagtagcagcattttgtgtaacctcatattcttcaggagacagtttcttttttagctctgctttggaccagttatttgaattcatttaaattcccccttacctataacatcgattataaaacattcatgtcttttaggggattaagatgcttacaaaataaaagctcaagttaaaacttattaattaatcgggcaatattctcagcaacttgggcaatatcatgcggagcatcgatcaatgcttgctctaaagttttaacacctgacacacttgaaaacaccgcatcgattgctttatctgaatacaattcatcgataccttcaccaatattaccagtgattacaattactggagcgcttgcagcaacagatttagttgccaatgccactccataaggcgttttaccaaacttcgtttgataatcaacaccaccttcaccggtaaaaacaaaatcagctccttgagcttgttccttaagtccactatattctgtaacaatatcaattccctttttgatagatgcgttggtaaaagctagtaagcccgcacctagccccccagctgcacctgctccaggataattagctaagtcttgatttaaatcgcgtttaataatttcagcataatgcgtgagactttcatctaaaattcggatcattgccggcgtcgcgcctttttggggtccaaaaactacggatgctccctttgggccaactaaaggattcgtcacgtctgaagcgattaaaagttggactttagctaaacgcggatcaatgtcagtcatgtcaatttgagctaaatgctttagtgcttcacctccacgaccaatttcatgatgcttattatccaataaatggaccccgatggcttgagccattccagcccctccatcattagtggcacttcctccgattccaataatcagctttgaaatatgataatctaaagcctttaaaattaattctccggttccataggttgtagttattaaaggattttgtgtattttgattaataaattgaataccacttgcttgggacatctcaattaccgcggttttatgatcacctaagataccaaatgtagcttctactggatctcctaatggaccagtcactttttcggtaattaattttccattagtagcatcaaccagtgcttgcacggttccttctcccccatctgccatagggactaacgtgtaatcagccttcggataaacccgagcaataccattttggattgcgatggctgcttgtttggcagttaatccacccttaaatgaatctggtgcaataacaaatttcatattattatatatttactcctaggttatgaattttagtatatctaatcctatttcagtggaaataaaaaacagatgaccttaagccatctgttttagtattcgtcttatgcaaatgcatccattaaaggaggtacaacttgttttttacgtgatacaacgccaggaaggtctgctgtgttgtgatctgataattcagtgttaaatgctttttcaacgatatcctttggttcaccaactactagtaagcgtgaatcacttgaaagaatgttagttgcaagtaataagaacatgtcatagccgttcttttggttttcttcttccattgtcttaactagtgcagcttcacggctaaatacgtcatcaaggtcaactgtattcacttgaccaatacggattgtctttccacccatatcaaagctcttagcgtcaccgtcaaccaattctaattcagacttgctagaaaggtccgttccggccttaagcatttctaaaccgtaagtttctacgtcgatattagcaattttagctagttcttcaagggctttacggtcatcatcagttgtagttggtgacttaaggagtagcgtatcagaaacaatggctgaaagcatcaatccagctaatttagcaggaatttcaacattattttcatggaataatttagttaaaattgtacttgtacaacctactggttcagcacggtagaacaaaggttgtgaagtttcaaagttagcaatccgatgatgatcaacgactgcagtaacggttacttgatcaagatcggaaacactttgttggctttcattatggtcaacaagcataactgaatctacttcgttggcagctgtttcgattactcgtggagttgcttcatcaaagtgtgctaaaacaaaagctgtttcagggttaggattgcctaaagcaacggcttctgcatctgctactcccaattgattttgtaaatatgcaaaggccttcgcagcaacgattgcgtctgtatctggattagaatgtccgaaaacaagttgtttattcattataaaaagtctcctttaatcatctttttttgtagttaagttacgtaccttatcaatatacttctcgccgtccatatattcaaagaaggcactcaaaaaggcgtttatccgtggaattttgtctttgtcttttctgtaaacaaacccaatttcatagctaatcttagggtcaaacttagttatataagcatcagttgcttcgtcttgatgggctaccacaaaagattccggtaatgccgtagcgatccccgtgctattcgaaaaactcaaaatttgagcgggggttgtaaagtaagcaacactcttaggtttagttaccatcgcatccttaaatacttctgtaataaggtcatccaaataataaccttctggataagatacccaatcaaaagctgctgcacgttttaaacttacgccccgtgcttttgataaacgttcatcatgatgaacaaaaactaaacgttctgttccaatcttacgtgctcggtaagacttccaactacggatattagcatccggaagatatgtaattgcaaagtctaatcggttactttctaaaccttcccaaatttcaaaacgcgtgagcatatgaacagttacattaatttcaggaacattattgtaatagttagcgataaaatcttcaaaaatacgagtttcaagcgaagctaaaatcccaaccgaaatatcaccacgtccgctacttgttgcttgttgaatctcatcagtcgcatggttcaaaatacgattgatttcatgagtagcgttcaacattgtgtatccagcgtcagttaaacgaagttttttgccgagggtgtagaataatggcgcacctacggcatgttcaagttttttaatctgctgtgttaaggcgggctgtgtaattcctaaaagttgggcactttgtgtgtagctcatcgtatccgtgagtcttaaaaaatatgacaaagttttagatgaaaaaatcttttctgtttttgtctgcatactagagcactcctttcagttagcctaaacgaactaacaatctccaataataagtctaatattagtattcataaagggcaagtaataatctgcttaatttatttattatttaaaatttcagaatctaattcctttaaattcatcgatactggtacaccttctgaatctacatcgaccaaaaagcttccattggagtaacgttcatttagtggatgctctagtggaataatatcatgaattaatcctcgtgaagttcggacttcaaaagcttcacctggttcgaccacttcaatatctgcaactcgatgtggttcttttttaagttctcttagaatttgaacaccgcggcgagcacggctagtcacactaatttcactaaccttcatcttcttaaacgaacctcgattagtaattaaaccaatctgatcatgatcgtttactagtacaaaattagcgatttcatcttcacgaagatccatcgatttaacaccggctgcgcgaggaccaacttctggaacttcaattaaatcataccgtaatccataaccattacgagtggccaaaagaatggtttctttagtcgattgactggttagcttagccacattgaccactttagcatcagctgcttttaatttaatataaacggcggcttttttacgatacgtacgtcctggtttgaaatctttgagactcgtgcgcttaatgtaaccatcacttgtggcgatcaagaatgacactggttcatcgaagttcttaacgtcaaaggcctttagaattatttcatcgtctgctaatccgattgcttgagaaatatgctctccagtatccttccagcgggtttccatgatttcatgtaccggacgataaatcagatttcctttattagttaacatgattagatgatccaaagtatttagttcctttttgaagacggtaaaatcgccctccttgagaccgtcctcttctgcggaagccttgtaggaacgtaaactactacgtttcaaataacccgattgactaactaaaaccataacttgttcttctggcactgtaatggttcggtcaaccactaactcctcaatatgttcctgaatttcagacaaacgtggtgtggcatatcgttttttaacttgacgtaattccgccgacaagacttttgataattcattaggattattaagaatgttattgaactcatcgattgaatcattaagtgccttagcttcgcttttaagctccgttacatcggtgttggttaagcggtaaagttgtaaggacacgatggcttctgcttgtcgttcagaaaagtcaaaactagtaatcaagttttgcttagcatccttcttatctttactacctcgaatagttttaataacttgatccaaaatcgaaagagctttaattaaaccagcaacaatgtgcaaacggtcttcagccttcttcaagttgaattttgttcgtttggtaatgacttccttttggaaatcaacatatgcttgaataatttctttgagtcccatgcgttcaggtcttagtttattaatcgctaccatgttgaagttataagaaacctgtaaatcagtattcttaaacaagtaatttagaattccacgagcgtcgacatctttctttagttcaatggcaattgagagtccatcacggtcagattcatcacgaatttcagcaattccatcgacttttttcataacacggatttcatcgatttttttaactaacaaagctttgttaacttcgtagggaatttcagaaacaatgatttgttttttattaccacgaatttcttcaacggaagttttagatcgcactactactcgtccttttccggtacggtaagcttgcttcaatccattaattccttggataatccctccagttggaaaatccggacctttcacaaattccattaatttttctaaagaaggattagggtgtttgattgtataaaggactgcgtcaataacttcacccagattatgtggtggaatttcagtagcgtaacccgctgaaattccggttgctccgttaactaggagattgggaaaacgcgctggtaaaacggttggttcatattctgtatcatcgaaatttaaaaccatatcaacggtctctttatcaatgtcatttagcatctcttcagcagcttcacttaaacgcgcttccgtataacgcattgcagcaggaggatcattatcaattgatccattattcccgtgcatttcaattaatgtaactcgtagtttccagtcctgactcatccgaactaaagcttcgtaaattgaactatcaccgtgggggtgaaaattacccattacgttaccgactgattttgccgattttctaaaagctttatcatgcgtgttaccgtctttattcattgcaaagaggattcgacgctgaacgggttttaacccatctcggacgtcaggcagagctcgttcttgaatgatatattttgaatatcgtccaaaacgatcgcccataatatcttcaagagccagttcttgaattttagattgattatcagccattcatattccccttctaattgttttctatatcaagtttaatttcttcaaaagtttcatttgaagtattggttggatctccagcttcatgctcatgtttcacagcttcgttgtctaggatactaccatcctcttcaagcgtgaaagccacgttgctttcaatccatttccggcgaggttcaactttatcacccatcagggtggttactcgacgttcagctaaagtgtcatcatcaatacgaactcgaactaaggttctagtttcgggattcatcgtagtttcccagagttggtctgcattcatttcaccaagtcccttaaaacgttggagggagaatcctcgacccatctgtttgctgacactttcgagttcttcatctgtccaagcgtatgcaattttaaccttcttattgagtcctttttgtaacttataaagcggtggcaaagcgatgtaaatttttccggcatcaatcattggccgcatatatttatagaagaaagttaaaagcaacgtttgaatatgagctccatcagtatcggcatcggtcataatgattactttatcgtaattactgtcttgaacattgaattccggtccaactccagctccaatagtataaataatggtattaatttcttcatttttaacgatatcttgtagtttagccttttccgtattcaaaacctttccccgtaatggcaagatggcttgaaatttacggtttcgtccctgtttagcactaccaccagcagaatcaccttcgactaagaataattcatttttcttagagtttttagattgtgctggagttaatttaccagataagatacgttcttgtttctttttccgttttccggtccgcgactcatcgcgagcttttcgcgccgctactcgagcttcacgggcattgatcgctttacgaactaactgttgggcaaattcaccattttccatcaagaaaaagccaagttgctcactaacaatggcatccacaatcggacgagcttcaggagtacccaatttttctttggtttgaccttcgaattccaataattcttctgggatgcgaactgaaataactgcagacaaaccttctcgcacatccgagccttctaaatttttatctttttcttttaacagtcccattttacgggcaaattcattgaaggctttggtccaaccggaacgcatcccgacttcatgggtccctccatcacgagtacgtacattattcacaaaggaaaggatcgtttcagaatagccatcattgtactgaccagccacttctacttcgattcccttttttgtaccatcgaaatacatgatattaccaagggtatctttatcttcattaagataatcgacaaattgcttaattccctcatcgtaaaggtattcttcgtgttgttcgtgtccttcacgccgatccgttaaagtaattttaaccccacggagtaagaaagctgattcgcgtaatcgtactgctaacgtattgaagttaaacacagttgttgtgaagatttctttgtcaggtttgaatgtgacagttgtaccgtttttgttagttgttttaccaactttttttagggttccaactgggtgccctccgttaacgaaagtttcttcatatttaactttgtctcgcacaatctcaacggttaatttttcagatagagcattaacaacactagcacccacaccatgaagcccaccggatgtcttataaccaccctgtccaaattttccacccgcatgtaaaacggtaaaaataacttcaggtgtaggtttgccagatttatgcatccctaccggcattccacgcccgtgatcgaccacagtaatgctgttatctgcttgaattgttacgttaatttcttttccatatccaccgagagcttcatctacggcgttatcgacgatttcgtaaactaaatgatgtagtccacggccatcggtcgaaccaatatacataccaggacgcttccgaactgcttcaagtccttctaagacctggatggatgaatcatcatacgatgttttacttgtttttgccattcatgttactcctttaaggtcagtactattatcataacttatttttaaactgatgaaaacatttcgataaatgttataatactgcattgttactgtaatttattacaattaagtcaaatgtataaaatatgcaggattttttatagaaaagaggaaagaacatgatagaaattattatcatgctacttgtagcttatctcctaggctccatcccttctggagtactggttgctaaacattttaataaagatttacatcaagaagggagtggtaacactgggaccactaataccttccgcgttctaggcgtaaaggctggcgttttggtgttgtgcatggatcttttaaaaggaacgatcgccactttgcaaccgattgtcttccatgtacagggaattaatcctttaattattggtttaggagctatcttaggtcatactttttccgttttcgatcattttcgtggcggaaaagcggtagctacaagtgctggaatgctgctagcctataatcctagttattttttaattgcctgctgtctttttattttcttcatttacgtatccagcatggttagtttttcgagcatcgtgtcctctccactactggttattatctctcttttttaccacgattggattttaaccatcgtagcggtagcactgacgacctttatcatatatcgtcatcgtacaaatatccaacgtattctggctggaaatgaaaatttagttccatttggactctattatcgaaagaaaaataagtagctgcggtttgaattacatacaaaacccctaaaagattaggtttcgccttactaactcgcgaacctgaccctttaggggttttctttttagaagaatgacattgaaaattcttgattaaatgtttcttgtgcagctaaacgatttacaccaagcttatcttttaattcaccattgaaatcgacagtatcagcaattccccaccatggttctaaacaaacaaaattagcagtggctggatatggtgaccaaataccaaggtatggagcgttagcaactgtaaacgcaataccgtgattattcacttcattttcggtcattaaggtgatttgttctcccttaaggtccaagatgatggcgtcatctttaaagagcgcatgcgttaaatcaagcggagttgtagcatcaaacttgatagggtttttaggatccgtgtaaggtgccttaagtggaatttgattatacacttgtttaggcgcgattcgaatatgagtatcttccatctgaatttggttatctccaagatttagattaaatccagggtgcccgccaatcgaaaataataaatcttttttagaatcaggattaactacttcgtaatgctcaatcaattcatgatcctttaatgtgaagtgcaaacgtagtttaaactcaaatggaaatttttgaagagtttctgtatcgctatttaattccataattacgtgttgatcatcttgttcaactgcttcaaaatccatatcccgtgcaaatccatgttgacccataggataagtttgatcctcaacttggaattggtcatcctttagacgtccaacaaagggaaataacactggggcatgtcggccccatactgcagggtcggcttgccaaatatattcaatcccatcattagccttaacactggataactcggcccctttttcgttaattttgactgttaaatagtcattttttaaagtaaccgtcatcggttgaaatcctcctactataagataaactcactcagatctttattttgagcaatgctaccgattttgtcatcgacatacttttcagtaatcgttacttcgcccatttccattgaaggaccttcaaaaaggatatcttctagaagatgttccaaaatggtatgcaaacgacgagcaccaatattttcggtttcatggtttacttgttcagcgatagctgcaatgcgttcaatggcttcgatcgtgaacgtaatcttcacattatcagttccaatcaatgcaatatactgcttaactagtgcattcttaggttcagtgagaatcttaacaaagtcttctttagttaagtcgtttagttcaacgcggatcggaaaacgtccttgtagttctgcgattaaatcgctaggtttactttcatggaaagcacctgaaccaatgaatagaatatgactggtgtctactaaaccatacttagtacttacttgggaaccttcaacgattggtagaatatctcgttgaactccttgacgagaaacatcactagatgaattttgaccagagccggtaattttatcaatttcatcaataaagataattccagtattttcggctcgttgaatagcagcgtgatacaagtctccatggttaaccaacttgtcagattcttcgcggattaaaatttcacgagcttctcgaacagctaccgttcttgtaatctttttcttaggcattaagccattcaaagattcacctaagtcgatccccatttggttcataatattgccactgttattttgcttaggatcgtccatttcaatggtaaccatatcattctctaggagacccttagctaacttactagcaacattcatccgtttttctttgatatcatccggcactttttgagaactttggtttaagttatccggtgtacgtccttgctgtaattgattaagcatgttcatcatgttttgaatatcagcagcattgtttttattttgagtatccgttggaacaggaacgaggagttctacaatgcgacggtccgcattcttagaagcttctgctcgtacatctttaaaagagttttcttcttcgatgtgcaccgcattttcgactagatcacgtaccattgattcaacatcccggcctacgtaacctacttcagtaaacttagtggcttctacttttacaaaaggagcattaacgattttagctaaacgccgtgcaatttcagtttttccgaccccggtaggtccaatcattaataaatttttaggtgtaatatcttcttgcatatcaccagaaagttgtaagcgacggtaacgattccgtaatgccaccgctactgcgcgtttagcacttttttgaccaattacaaattgatctaattcttgaacgatttcttgtggtgttaaattatcttgcatgatttagtcttcctccttgaaatccaatgcaataacattgtggttcgtaaagatatcaatatcacccgcaacgttaatcgcagttttagccatttctttcgcactaacttgcgtagcatgcttcttgagggctttagctgcggccagcgcaaagttaccgcctgaaccaattgctaagattccgtcatcgggagcaataacttcaccacttccagaaacaagatacatctctttttcgtccataacaattaacatggcttctaatttttgaagttgttgatcaccacgccaaattttggctagttcaacagaagctctttgtaaattcccactatattcagaaagcttcttttcaaatttttcttcaaggttaaaagcgtcagcaacacttccggcaaaaccaacaatgacctttccatcataaattcgacgaaccttgcgggcagtccctttcataataaatttttcacccattgttacttggccatctccggccatggcattttcaccattatgactaatcgcaataatggttgtcgcatcaaattttactggcatttgtattctcctttttaattaagcatcagtcgagcgtggaaaatattttcggtagctctcttgtagtttttctttagtaacatgcgtgtagatttgagtagtcgataaactggaatgacccagaagttcttgaacagtccgcaaatctgcaccgttgtttaataacgccgttgcaaagctgtggcgtagcatatggggatgaattttcccatttaagctgctggcggtaatgacttggttcaaaatgtattcaatcccggttgtggtaattggcttagcataatggttaataaaaacaaaattatgggtttgtttatatttactcaaaaaaggctcccattcattttttcggtaattttggagcgcttctttggcataccgcccgaagggaacataacgttctttatttcccttccctagaactaggatagtttgcattgaaaagtcaatatctaaccattgtaacgctgcacattcacttactcgcatccccgtaccataaagcacttctaaaatcgcaatattgcgtagcttttgcgcaccttccgcttggtaaaccgcttcaaagagcatgttcatttccttttcataaaagaaatgtggcagcttgtcagattgtttcttcagttggactaattcaaacggattcttatccactaaatcattcttaactaaaaaacgataaaaagagcgcaaagcagatacttttcgcgaaatcgaagttcgagctaaatgtcgatcgaataaataactcatataaacattcacatcgaaacgatccactaaaagtaggtccgttttatcacccgtgtcagttaaaaatttttggaatgcgtcaatatcttctaagtacgcagtaaccgttttctctgaatattgacgttcaaccgtaagatactgtttgaacagtgaaattaattccataaaaaacctccaacacttgtcactgtagcaaatgttagaggtaaacgtcaattaatattttattttttaaactatttttgaggtgtttcttcgtagtcaccatttggacaaacaatttgtttgccgcctttaattttcttttcaatcaagtaactatgacaaacaggacattcacgagcaattggtttatcccatgacacaaagtcacagtctggatacctagagcacccatagaacaatcgaccgcgtttagatttacgttcaataatttgcccctgatgacacttaggacaggttacaccaatttctttaacaattgcttgggtattacgacagtctgggaaacggctgcaagcgaagaacttaccgtaacgtcccattttgactaccatgggtgaaccacagatttcacaattaaaaccagctagttcgtctttaatctgaactttttcgatttgttcctgtgctttagccagttccttagcaaaaggtttgtaataacggtcaacgactttcacccagtcttccttgtcttcttcaatcgaatccaagtctttttccaagccagccgtaaaatcgatattaacgatatctgggaagaagtcataaataatttcattgacgatttcacccagttcagtaggttcaaaatgtttagactctaacttaacatagtaacgcctttgaatcgtgtctaaggttggagcgtacgtagaaggacgacctaccccattttcttccaaagctttaattaaagtagcttcactatagcgagctggtggctgagtgaaatgttggttcgggttgttggtaaccagttggacttggtcgccctcttctagatttggaagaacgttatctttatccttattggtcttgtaaacttttgtgaaaccttcaaatttggtctttgatccgttagctcggaattgaactccattttgttcaatcttaaccgtcatggtatccgagacttctggtgtcatttgactagcaacaaaacgggaccaaattaaattataaagcctaaattgatctttattaaggtattctttaatactttcaggagtccgcaatacggacgaagggcggattgcttcatgggcatcctgagcaccctcgggcattttacccttccgaggcttagtagcagcatattctgcgccaaactcatcatgaataaataatgaagtttcgtgcttagcaacctcggaaatacgagtcgagtcggttcgcatataggtaatcaaaccgacagtgccttctttaccaatgttaattccttcataaagttgttgggcagccatcatcgttttacgcgttctgaaattcaacgtcttatttgcttcttgttgcatagaactagttgtaaaagctggagctggataacgtttgcgttctcggcgtttaacttccgtaatatcaaaatcagccttagggtcgattttctttaatacttcctgaaccttatcgttattaggcagcttcatctttttgttattcacgccataaaaggcagccttaaatttagagcgtccttttttaaattcagaatcaattgaccaatattcttcaggttcaaacgccttgatttcttgttcacgtttaataattaaacttaaggcaattgattgaactcgaccagcactaaggccttttttaactttttgccataataatggagaaatcgaatacccgactaaacgatccaaaatccgacgagcttgttgagcatcaacgagcgtcatatcaatgctacgcggggttttgaatgcatttttaacggcatctttagtaatttcattaaaaaccactcgattttgatctttgggatccaatcctaatagatatgaaaggtgccacgcaatggcttctccttcccgatcgggatcagatgccagataaacttttttagcttttttagcttctttacgtaaatttttaatggtatcgcccttaccacgaatagagatgtaatggggttcgtaatcattttctagatccacgcccatcttactctttggtaaatcacgaatatgtccaagactcgcaactactttataggtacggcctaaatatttttcaatggttttagccttggatggtgattccacaatcacaaggttttttttcgctgctggcatttgttgctcctttgccttgttatatttaaaattttatagacaccatgttattgcataatattcgatattgtcaaataactatcattaatccagttataatttcaatcgaatttatccctaaatgatggtaataatgatactaaatccgcttaattattaataaaatttctaataaccgtcagaatccagctaattataccccaatttaaaaagatggactacccgttttgtagcttctacagggctttattcaaaataagagatgacattttagttaacctaaaaaatgtcatctcttattctaaaccattagtctaattgtgctcgaatgccagctaagctaacttcatttgtagtatcaaattggatctgagcttcgggtaaatcaccaattccaattgaaagttcaccagcagcattaattgattgaatgccagccgctgaatcttcaatccccgctacatgattggtaggtaaatgtaatgcttgagcagccttttcaaaaatttcgggatcaggttttcccgctttcaacaagccagggtctacgattgctgcaaaatactctgtaacttttagatgttcaagaattccaggagcatttttagaagctgatgctagtaccaaacgataatcatgctgtcttaattcgtctaaaaaagcttgaattccaggtaaaatatcgttaggtgttagtttagctattaaaagttgatactcattatttttttgttcagctagggcttgtttttcagctaagctaaagtcggcttgacggttgccagactcgaggattaattccaatgaatccatgcggctaactcctttaagactcgctgctaacgttggtgtccagggcactttaatttgatctgcaatattatgccaagcctgactgtgaaacttcgcagtatctgcaataaccccatcaaggtcaaaagcgaatccctttatatctgaaaatttcattcctaattcctccactcagcttaattcaactttcttaccatttaaatcaacgcttagtgggctaccactaatcaatttaagatttgttgcacttttatcgacactaacttcaattactcttccgcggaattgttgtctaaatcggtaagatgtccaatttttcggtaagaatggggcataatgcagctgatcattacggacccgcattcctgcaaaaccttgaacaatcgctaaccatccacccgtcatggacgtaatatgcagaccatccgcagtatcattattataattatctaaatctaggcgggcggttcgttcatacatctcaacggcttgagcctctttgtgtaagtcagccgcaagaactgagtgaatagcagccgataaactagattcatgcacagttagtggttcataaaaatcaaaattccgctgtttttcttccattgaaaaatcgtcaatgaaatcccaaattccttgaagaacatccccttgtttaatatatggtgaacgtaaaattttatcccaagaccaattttgatttagcggtaattgttcctttggcaatgaactaactggcttcaaatccttatttaagaaaccatcattttcgacaaagattccgcgcttagaatcttctggtaaatacatattatcgataatttcttgccagtgttgacgttctgctaacgatacattaacttttttggcaacgtcctcttcgatctgatccaaaatttccaaggtataacggagtgtccaccgcgccaataaattggtataccaattgttatcaacgttattttgatattcatcaggaccagttactccagcaatcatatattgtccattttctgctgaaaaatggacgcgatcagcccaaaaacgagcaatttcggttaaaacttcagccccttcgttaaggacgtaggactgatcacctgtataacgggtgtagttgtaaatagcaaacgcaatatcgccattacgatgaatttcttcgaaagtgatttcccattcgttatggcattctatcccattaaaagtcaccatgggatataaagctcctttaagcccctgttccctagcatttacaaaggcgccatctagctgattgtaacggtactttaacaagttacgaacgaccttagactccgatacacctaggtataccggtacggcaaatgcttcagtatcccagtaggttgcaccaccgtatttttcaccagtaaaacctttaggaccaatatttaagcgcgcatcgttaccataataggtagaaaagagctggaataaattaaaccgaattccctgttgggcttctgcatcaccattgatttcaatgtctgatttttgccatctttgtttccattcttgaacatgctgttctaacagttgctcgaaactttgcgtcttaatcgtatgcgttaattcctgcatccgttcgtttatttcatcgactgtaccaaaatctctagatgaggcaaaaatggttcttttctccattatgctagtcgtagcaggttgtaaagctatgtgatacttttgaccgatcgattgatcgttttctacatcaccgacatagtccatatccgtcttgatgatcgtatcaaaacctaccgtaaagcgttccgtgccaaaatcattttccttggttttggcaagcattttcacttcgttttgctgactacttttagcaagtacgtcccaaaattgttcaccgtaatttgaatcttcgttgtaaacatcagcatcaatagcactaataacttcaatatcagctttgctatcagataaatttttaatcgtcagacgttgtccaactaattctttaagtgcggcactcacgaaacgttcaaaaataaatttcagttttacgccaccaatttcaaccctaaaactccgagttaaaatagctttttgcatatctaaatctaggctaaagtcttgcgatacttgatggttcaaatctaattgttcaccgtttaccgtgattaaaagtttcataaaattgaccgagttgattaccttaccaaaatacttcggataaccgtttttccaccaaccaacacgagttttatccggataccaaactcctccgagataaattccttctaaagtgtctccggagtaaccctcttcataaaatcctcgcatacccagattttcattgcctaggctggtgattgattcttgaattcttttattttcaggatcccactggttagtttcaatgtgccaaggtgctatattaaatgttcgaatcatgattgttctccttgtctatatttaattattcagcaaaagtttctttgattgttcctacggcgaaggctcctaaaagcattactgcgccagcaagtaggaacatattagcttgtgagctacctagaagtgggaataagccaaagctaagtaaggatgccacaatctgtggtaaacaaattgaaccgttgaataatcctaagtaagttcccatatgatttccagataaagcatttgttacgatggttaatgggtaagtattcattccagcccaagcaattccaactaggatataagaaacaattaaaatgtattgattatgaacaaagaaaacggatacaaaaccaagcgcaccaagaattaaactaactgcataacctgatttgtggaatcgattgggtaatttagccaaaatgtatgaacatgctaccgctgcaatcgattgaaccgctgctaaaacgccgtaccagttaccagctgcttgatatgcggccgaagatgcattagcagtgtgccaaacgttttgagcaattgcacctgctgaatatgtccagaggtattggaaagcgaaccaacagaagaattgaactaacgtgacggtccaaaatgctttaggtgctttctttaaaagcgtaatccaattaccaccttcactattctctttttcactaattccgtgatacattgcatatgtcgctggatcatattcttttactctaaatactgtaaataaactagttataattaataaaattgcacctgcatagaatgaaataacaactgattgaggaacgacgcccttattcgcagtgttggcaactcccaaccaagttaaaaggaagggaaaaatagctgctaaaactgcaccagtattagataagaagctttgaatcccgtaagcataacttttttgtttatcgtttaccatgtcgccaatcatcatcttaaatggttgcatagcaacgttggaagatagatctagaaaagctaccgtaatcgccccaaaccagagtgccattaatgaaccataaccaaatccaaaactacctgaatttggcagcagtagcatcacaataacagcaattaaggttcctagaattagataaggtaaccttctaccacctaaacgtggtttccaagttcgatcggagtagtaacctacgataggctgtacaatcaaacctgccaaaggtggaagaatgaaaaaccaccctaagttgtttggatccgctccaatcgtttgaaaaatacgcgacatttgagaactctgtaatgtaaatgcagtttgaacaccaagaaaaccaaaattaatcatccaaatcaaattcttggaaagcgtcggaagacccttcccacttgtcttatctgccaatgataacaaccccttttaatttttatgaagcgctttcatgttattaatttaacatagagatttaaattgtgcaagcgtttgcacttaaattgtgcaaacgcttgctttttgacaaaataaaaaaagaggtattcctcttttcttaaaaaatatcaaacccgactgtcgcttttcttaattcggaatcgaatagtagttcaaccgcttttttacctagttcccgtggtcttaaatcaactttattaacggtggggccggctagactaatcaacctactattattaaaacaaatcgcggggatgtttttaatatgctggttttcttttaatagatgataaaagcttagcaattcaatatcatccgctccaataatggcatcaatctcaaaatggtgtttcatatatttatcaatagctactttattattgtttttttcaagtttatatattaaggggcctgaaccacttttagtgctcatcacttgctgatatcctaactcacgctttttttcatattcccaattataagtagatctgagaaaaagtggatgtttagcattatactggttaaacataaattcagtaacttcacgtcccgctaaaatattgtcattatcaataaaacggtcattttcattcgttggttcaccgataataacaaaatttaactcttgcttcctaagataattggttactacatcgtctgctttagaatacagtaacaagaaatcgtggatttggctttgttccaccattcttttcacattgtttaataacgcttcttcagtttgacaaattgcgacagataaaacaaagtttttgagttgtaacgctgtgttaattcctcgcattaagtcaatatgaaacggattagcaggatcttcgtcagcggttactgggtaaatcaccccaatttcattagctttgcctagggacaaagttttggcgctggcattgggcttatagtctaattctttagcaattttcttaactttttcaatggttgttgcactaattctaggattattatttagtgctcgagaagctgtcgaaactgatactccagcttctttagccacatctttgattgtaatcatgcatatacctcaaaatttaatatttacatatacaagtataacttcctagacgatgaaattctacatagcgtcctttcatgcctagatacaatattccttacaaaacttcttctagaacgtcatccaattcgattaatggccgagcaccagctgcaattaactggttggttccttggctattaccactgaaaatactccccgggattgctaaaacatttcgattttccgtgagtgccagactagccgtgattaagctcccagaattctttcttgcttccactacgcatgttgcggtggtcaatccggcaataattcggttacgttctacaaaatgatgtcttaatggccgagccccctggggagattcacttagaattaaaccttctttttgaatttgattttgaagctgagcattttgcttaggataggtaatatcgagcccatttccaattacggcaatggtagatcctgcatttgctaaagttgcttcatgaaccaacgcatcaactcctttagctaaaccactaacggtggttaattgattagctactacgcccggaattaaacatttaatggcttgttcaccataactcgtcatcatcctggcgcccacaattgcaatagcactttgatggcttagtagcaatagatttccattgtaaaacaaaactgtaggtgggcaatatatctcccgcaatagcttagggtacatttcatctagaatggttagaattcccccactttgttcattaatttggatttcgtgggttagttgttcactttgtaatgtggcagttaattcatctttttgacttttcttaattagtttcgttgttccaatccactctgcaatggataattcggggcttttacgaatttcttggtaaatttgatactgctttttaatgcctaaattcgtccccacttttactctaatcaaaaaatcacgtatttccatttgatcacctcaaatgtactttacgtgtttttaggttaatttattttattaaaaattcaggtaccggttcaaaagtctgacgatggatgggagttaccccataagtttttaaaccctcaatatgttgcttagtaccgtaacccacgtttttatcaaatccgtaacctggatagattgcagcataagaacgcattagatggtcacgatataccttggcaacaattgaagcggctgcaatactaatacttttagaatcacccttaaacatcacagtttttggaatttctatcggcgcattgactgcatcaatcaacaaatgttgtggagtaacatttaagttacccactgcttctcgcatcgcaagttttgtagcatttaaaatattaacttcatcaattttttggttagaacagacgccaataccgacgctcacagcctctgtaaggattttggcatataattcctctcgcaattcactactgagctgcttagagtcattaacgtcgattaaatcgaaagtttcatccaagactacactggcagtgacgaccggacccgctaaacatccccgacccacttcatcaatcccggctactaagtcaattccatttgaccataattctcgttctaacgtaaatcgtgcttgaaatgcttctttttttaatcttaattggttaatttctttttgtttatgtttaattaagcgttgaacaccagttcgtgaatcttctgaaagttcaactaataacgggtcatctagtgtataaacacttaaaagctgcgtcttaatttccttaatcgtcgccaaggtcttcaaactcctctacaaagtctaaagtgaaacgacccagtcttcctttacgtgcgtctaacaagattcgctgactagcacgatcgtagtcgtcacgcatccctaatttttgagtaattagtagtaacaattcaggtaattccatttctaaatcgtcttctgttaagtgataacgttccatcaatccttcacgataatggttgatgaatatatttagaccatagattacaacatcatcattagcaaataaattatctttaatcgctccagtaaaagccaatttatttcctacattttggtcttcaaatttaggccataaaattccaggagtatctaaaagatatagtccgcgacgtgaacgtaaccattgttgttttttcgttaccccggggcggtcacctgtaatcgccaccttcttattaactaagtggttaagcaacgtagatttaccaacattggggattccaatacacatggaccgaatttcagcatttttaattccacgatcagccttgttagctagcttgtcggctaaaatttcttgagttttcttcaaaatgatattttcagttgagggctctttagaattcaatgcgatggcgtattcgttccgtgatttataataatctaaccattttttagtctctttaggatctgctaaatcagccttcgttaagattaaaagatgaggtttgcttttaataacatcttcaatcattggatttcgtgacgacactggaatccgtgcgtctactagttcaaatacgatatcaaccagttttaatttttcttcgacctgacgaattgccttcgccatatggccagggtaccattgaataattgccatgtttgtttaactcctatttcgttgggcttttatgccattttttatatttaaactaagctattgttaatctaatactctttattttagcatggttttttcagttttggtttttggattgaatggataaagttttaagattactaattctttcctttagctaaattggtaaccgacataattttatttttgaaaaaatattttctgaactgaggcaaattttagttattaaaataacaaaaccaataatcctcattctgaaccaaaaccaaaataaaaagcgaggatcaccgaaattaatctgtcatcctcgcttttcgtaaataaagtccaaagtaaactacctgctaagttaggcttgctcaatcacgatttgatcatccttcaaatcagcttttaaatgcttaatgtccaaatgatctaaatagaaatctgttaccttatcgcgaatttgttgttcaatcacccttcttaatggacgagctcccattgcttcgtcatatccttgttccatcaaccaatccttagctgcatcggttactttcaaagtcaaatcctttttcgctagtgttttttgaacatcagaaatcattaaatcaacaatctgacttaaatctttcttagttagatgtgagaattcaacgattccattgaaccggtttaggaattctggacggaagaatggagccaacttatccattaaagtttggtctttatctgcatcaccagttaacttttcattaccaaatccagcattggatgtagcaataataatggtattcttgaagttaattacattaccttgtccatccgtcaaacgaccgtcatccattacctgaagcaaaagcgtcaatacttgtggatcggctttttcaatttcatctagtaatacgattgaataaggatttcgacgtactctttccgttaaggtattagagttatcatcatagcctacataaccagctgatgtaccaattaattttgaaacagcggcccgatctgaatactcactcatatccaatcgaatgattgcatccttatcaccaaacatgtctaatgctaattgtttagctaattcagttttaccaaccccggttggaccaacaaataggaaactaccaataggctgttcaccttctgaaaagcctgctcgattccgacgaatagctctagcaaccattgctaccgcctcatcttgaccgataactttactctttaagcgactatccaaatcttttaaccgttcaatatcattagcacccatatctgagactggaattcccgttaatcgttctactgattgagcaacatcatcaatggtagccactacttcttcctttttacctacattatcaatttgcttattagtagcctcaatttgttgcttcaaatctgcggcccgcttaaagtcttctttttccaccgcttgatctttttctttttgcaattgattgagcttttcctttaaagctgtttcatcattttcaggttgatgtgctgccaaatgagccgctgtcatatcaatcaaatcaattgctttatctggtagcgttctttgtggaatatattggatggagtaatctaccgttgccttcaaaacatcatctggcaattttacatggtgatgttcctcatacaagtttttgataccctttagaattttaagcgtgtcatcagcattaggttcattgactacaacatcattgaatcgacgagccaaagctgcatttttcaaaattgtattgcgatattcatcttgggtagtggcaccaataacggttagttcaccacgagacaatgctggcttgataatatcagctaagcctttaccaccgtcttcaccacctgttgaaccagtaccaataatctggtggatttcatcaaagaatagaataatattgccagcagccttaacttccttgactaagtctttgatgttctcttcaaaagaaccgcgatactgagttccagcttctaaggaggacaagtcaatagagtaaatttctttgtcccgaattgcttctggaactttaccatttacaatcgcttgtgccagtccctcaactatggctgttttaccaacccccgcatcgccaactaaaattggattgtttttggttcgacggcttaaaatttccgctgtttcttgaatttcattttcacgtccaataactgaatctagcaatccatcgcgtgcttgttctgttaagttggttcctagtttttctaaaataccgccctttttaagagcttgttgtccatctttagatacttcaattgtttttgcttgttctggtaatttaccagttgctcgatattgagcaaactcgtctggagttaacgattgaccattaaccaagtagcgagcagaatctgagttaggattccccatacgtttaaatacttgattaaaaatatcatccatatcattgttgaaaaaaggatcatttccgtaaaaattggccatataacaacacctccgttaattaaataaagtaaaattgtgtcttaaaactaagtaaaaacactcttttttacttacaactgtattataactcctttttagcactctgttaagtaaagtgctaatcgaatcacaacgttaactattttcggacgattataactgaaatttatgtttaccgttgcaatataatctctgggtactaaaaaactagctaaccaaaactaaaggattggttagctagtctcatgaagtttctgattcagcttgcttgaaaaaatatcaatcagttgggggcatcttccagtgtccatcttaattcaccatggtaactaccaatttgatccataggttctagtaccagttggagatactgacttaaatctaaatttaaattcccagtatcttgcacaatcgtctgattctctccgttgattacattacccttaaaataaagccttgatataagcttttgatcgttttggttagttagtggacgttcttctcgaacctttaaaatccacgggtagtggtcaagctcactacgatctttaatatgtacccactctgttctagttagtgaacagaccgtactttctagcggaatttcgtgcgaaccaaagtcgattttactaggtaatgacagctccggaccgcgttcttgtttaattatccgagtttctttattcgacatttgatgttggtcatcttcgaggtaaaaatctaccttcttattaatccatgactttggaaattggcttataatttcatcatcaacctgatgagcagcgttggaatactcttttagtattcgcttttctcccgcgcagtttcctaccaatctaacttttgctccatcttcgtgcgtaaaggaaactgtaagtttgctttgattagaaaatcgtgaaatatagagtgcatctcctagattttttagtttaaaactaagtttttcgcctttacggtaccgatgaatgattgttttatttcctggtaagaatgtaccagtattttgaactgcatcattcttgatgggaatgtaacctgcaattttaggatatatatcagccacgtcaaatttcgtggttaaaatgccacttttaacttctcgagcgcgaagtacctcgaaaccattgtccgctaaaaaaacaacattcaccctaccaacatagtctacagttgaaactgcgttacttatacctacagcttgcccattgacgctcgttgatacgtcaaacggtaaacctaattttccattaacaacccgagttggatctacagtttttttagcttcaagccactttaaatatactttataatgcagcgtagtatcggttattgctttagtagcagttgtcctcgtcttgatgtagactttctgattctcaattcgccaatcaaagtattgcgttacatctttcccatcaaaattagtaactttaatccgttctggaatatattgttcactattataaacatgttccagattaaaactaacctcagatgtgaaactattagtactaggtaccgtctgttgagccgccaaatatacgccatcattagcttgattaaaatcactactttccgcataagctggcgcagactcaggccttgctaaaaattcagttaaataaactaacgatgaaggtgtactgtcattattgtgtaccacaaaagtaacttgggaaatgggtttagtaactacttcaaaactttggcgcggatctcgccacggaatcccaactgtagtattttttaaatacatccattgatcttctgattcatacctaatattagtcgggttattagcgtaaactgcactaatcacagaattgcaatcttggtatccaatgtacttgttagaattaaggccgaagtaattaaatgctgttttaatcgtcagaggattttgattggcttcaacaaattgataagtaaccattacctcaccagcaatatcaattcccaaaaaataatccttagcaaagcttagtgatccaccctttaaattacttttatttcgtttcaacgttaccagcaaatttacagatttaccttgataaagcccaacatttcctacaagggcctggctcacctttattttctgatcaactgatagccgattcgtggtagcatccccatttaagggagtcacctttgttcgagcaccactatgcattataaaggtattttcagccggtgtaatcgcttgattggcccactgaaaattttcaagattagacaatggcttcaagctagcctttacgtcggtagctatccagcagaaacttacgagaaaagccactaataacaaacctttaacttttttcattagtcgtcctcttacctacaagaatttttttaattccatttttgatcagtatatagcaaatcaaacctaacccaatccaaaccatccccatcgcaatatcttcactagtttgtggtaaatattgtggtctggcacttggagtagcggtttgttttggacttttcttagtggattgagcgactttttgcattggtacgacttggctagcagcgtcattttgataaaaagtaatcccgattttactattagtagattcgttagctaacgcaattccattaatgttaagtattaatggaaataatattattcctccccaaaatttcatcttacttctccgttttattatttttctgttttacgtaataaatataaccgctcaaaattacaattattccaatcaaaaatcctattattaaataaaacaatttattatcggtttttttaagttcaacggtcttttgatttaatttggcatcgtctcctgtaattttaaattcccgactaagttgccatttcttgcccgtagaactacttaaatcaatggttaatacgtatcttccactttttaagggttcatcattccaactaatgggtagtcgaaaacgtgtccgcggtgcaatcgagatcttcttatgcgttctctttaaaatttcatggtgattttttttggttacggtagcccgcacgtctaatttactcaacaatacaggagctgcattttgtaaagtagcaaaaactgataaatagccgttatctaatcctggtatagcctttatcaaacttaacttaggttgtattttggagcttgcacactctaactttgtaccaatggtataagcaaaattattggtcaaacttaaacctgatgcactagtggcagccttaactggttttgtgtaacaataaaatcctcctaaaaccgttcctttaaaaccttttggtggaatcttcaactgaaagctaactcttcgaacttccttaggcttaagtaagaccgtttgtggtcctgaaataagctgtttaaaagtagggccgcctagtaatggggcgtttgatttagaataatcaatagctccattctgattagttatcgcattattagttttaaccataatggtttgctttgcattggttaagttacgaagtcgaataaataacttttgcgtagctcctggacgtacccgtaagtcgtagtaactaacttcggaatgctgatttttcggtaaaattgcttcagcattaaacgttacttgattatttacttttccactcgcattaattgaatttggaaaaataagtgttagcagcaacgtcattatataaattagaataatactaagtaatctacttttaatgtgctgattatttatactaagatggcgcatcggtcaatacccaagttaactcagctgaataactttgcgcttcaactcctgcacgtggtacgtggagtttaacattttcgttattaccatttttaccttcaaaaacagctgcaaaagcccccgctccttcgccttccttagcagtcattaccacttgatatgctcgatttaatttaaagctatcttgagtgatttttggcatggccgatttattattcttagttaccactttcccattagataaggacatctgagcacctacgagttcttttccattagcacctacaaaaggtgtaattgcaacccctaaagaccaaccttttgcaccaccacgagtgtcattaacttgaacatgtggtttttggtttaaggcgtagtaattcgcgtctgcttgcttaatttcatgttctccgaatgtaatgtttgaagcatacgggattgttagtgaccccatgtctcctgttcccgagtcatcgtcatgggtatcatcgggcacaacaggataaacatcctttccagaaccagctgttaaagttacatccgtgtgattcgttgcttctgatatttgtgaagccattgctgtattggtgtttatcgcaaacacaccgattgcaattgtcgttagcatcattttattcattgcatacttccccctcaaatctaatcaatcatttgatttaaaattattttcgcatgtcatctgaggaacttactagtctaatttttttcttgattctgaaaaaaattaaagtgttttgggcaataaaaaaagatgcaattaacctaattacatcttttatttggttaagcgataaagcattgcacctaactgccgccaattacgttctgtaggtaagtttttcattaaaataagtggacaatctttagtatcaatatagtaattagaaatcaccaaatctacttctgaaactggtgttttatagtcgtaaaattcaaaagcgaaagaatgaccaaagtaagcacgaattttgttcatcaaccatagtcgatgcgtatgatgtaagtcgtcttgtactagaattttaactggggtaactttttttgcgaacagatcatagtaatctaagatgaagtaataatttaaaaataattgttcacaattagctaataagttagtaactgattggttagaatgtttaactaactgttcctttaatttttgcataatttgatatttcctaggatgctcttctctcaactccgttatgtaggaacggttgaaaaacacgtcagaatttccataaaaaaaagtactacgttcatgaaatgctataaaattaaacattagttctaaatctgtggttcctaactggaaattaaatgttttcttaatgaccaatgccaaattcattacggcctgataggcatgcgtttgatttttctggtgtgctgatgcatagctattctcataatttggattaccatcgataattccaaatacatatataacttgatacaaaaaatataactcatcttgatttaaggtgagttctccttttttattccattgccacattaaatcaaaattaggatcgttatcaatgatttgcttcttggcaatcttcatatttagcggtgcaatctggcttcgttctaaggtaattgctagccaataagcaaattttttacgctgaagaggatctaaactaatgccgtatagctcttcaaaattagcaatatactcatcgagttttgctaattcagtattaaatggccaattattccgcatttcccgtgtggagttccaataaaagtaataataaaaactacgaatattgatttcatctccttttaattccaacttatacggtaaaaattgaattttataacgtttgaaatacgattttagtaatttagcgtatctaaaaactgttgatatactcgtaaactgactatctgcatagtcagccaatcgttggtgagggttatggtacataaaatcaattaatttgtaattgtaagaggcttgatagaatttcaaataaattgtatagataggaaaatcttcttcttttataattcgaaaatttttattatggtcgttgaataatctgattttctgatcggtcgacttgaataactgcttaaattcttccaaataatttaaaattgatttatccgttacaccgattacttttgctaattctttagtagaacaccatgccccgctttctagtagataatctaataaaaccactttttttaaagatgtggctgttaaaaacgttttcattttatacctcacataagatttaaatttactacaaataagctaaactttgtcagctaaaaagtttttaagtagatttctttaaatatttccaaaatgaactattttgtagctatttatatcatatccgttctaaaaaatacatatttaactcagaggtatgctagtaagaactcatcagtcaagttagtgttaattatctttaaattacgctatgcttaaattaaaaatggggggcgtctgtatgcgattatggcatgaaaaactaatttccaaactaccacgtgcccagcttttaggacagcatcgagaaattgcagccttacgaggtaacggttggggtaaaaaacatgcaaccgttgattatgtttttactcattctccttacaaactttatcaatttcatcgattagtattagctgagatgcagtcacgaggttatcatcctaaccctaaatggtttgaaccaactttccgtggtttccattgtccgccttatttagcattatgtgcttgcccactaacttccccaatctatccagaacatgatcaacagtatttggtggaatgtttggaaaatttagggtctaaaggggttcgattataagccaaacacccgacgggttctaataatatatttataataaaaggccaattcttacgaattggtctttttaagaattatcttttaattacatattcgttctctaatcccttacttaccaaaattttcagcaataatcgtcttggacttaactaaacgggccttattattactaaaatcttgggttaaatatgcataatagagtaaatcaaccacgtacaattgagctaacaatgacgtggtagcagcagtccgtaacactccactttcaccaccgtcatcgtgcgttaacgtaacagtactattttttgcgatagtactgttacgttcatgcgtaatagcgattattggtatgtttagcgaactagctactctggttatgtggcaactttccttggtctcacctgaatctgaaacaacaattaatactgaattaggtttggctaatccgaccgccattagatgtgtatctaacgtttggatgacagactttccaattcgaataaatttttgttgaaaatcctctgccactaaattagatgcgcccatcccaaatacgtagatatcatctgcttgctcaacaatatcggttgctttttttacatcatttttaagtaatatttggttggtttgtccgattgcatgacttattcgaaactccagcttatgtttcataacatccaagtcatccgatggattaacttcggtatacaaggaatcatctacctttatttctgacgcaacttgaatctttaaacctggcaaaccactcttacaaattttttttgctaacctaactacagtcgccggacttacttgagttcgatcagaaatttcttcggcgttcatctgaatcacctctcgcggataatcgatcataaatcgggctactttctgctcagatcttgaaaatttttcaaaatcgttactcaatgtaaataaaatatttttcataaaactttgaactcccacatatttgtcagttttaacattagctcctaattataaattatagtaatatatccaaaaagaccggaaaatatccgatcttctaaatttgaatacttagttaatatagttattttatcctactatccattaatacggtattatctttagtctgtatatttgattcaatttcgtcaatcttaaaatcggatgtgttagtaacaatcgtcattgtaactggatcaaaatcagcgtcaataattttttgccaatcaactgtacccaatacatctccatgtttaacagtatcgcccacttgaatatttaaattaaaatacttgccatttaacttaacagtatcgacccccatatgaactaggacttcttcaccaattttatccataaaaccgattgcatgttttgtgtctgctatcatagtaactttcccatctaccggggcatagattttagaattaatatcaggtattatagctactgtttttcccattacttcctgggccatcattggatcacttactgtatcgattgcaactttcttaccaataacaggagccgttatcgtagtcattacaacatttgaatcaattaccttcttatttccattttgggataaagcatctgtctcaacagttgttgcttctccaagaattgcatcctttggaattccaaagaaatatgttgctacaaatccaccaacgtatcctgctaataatcccagcacataagacatcatatgtccattcgtaatcaaaggaactaacgctaatcctgatgggcctatggcaatggcaccaacatggcctaatccaccaacgacagctcccccaattccgccaccaatacaagctgtgataaacggacgacctaatggtaaagtaacaccatatattaatggttctccgatacctaaaataccaactggaagagcacctttaatcatatttgtaagctgtttatttttacgacatctgagccaaagtgcaatcgcagctccaacttgtccagcacctgccatagctaaaattggtaataatggggtcgaaccagttttattaatcatttcaatatgaatcggcgttaagatttgatgaagcccaaacataaccatcggcaagaatagtgctcctaaaacgaatccagaaaatgctccgccgacatttagaatccaattaatagctccaactaacgaacttgaaataacaccagctataggcataataataaaaattgtaaatactccaattataagtaaagaaagtgctggagttactataatgtcaattgcatccggaacccatttatgtaactttttttcaattaaagaaagtaaccaaacggcaaatattacaccgataattcctccttgaccagcgctcattggttgaccattaaaaatattatgcaaaggtgcattaatatccattccaggtaataaagttaccgcacctatgacgccgcctaatccagctgttgcaccaaattcagttgccgcgttaattccgacataaattgctaaatatgaaaacacaccattttgaatgaatttcaaaattgcgacaaaatcagtatagcttttacttatatctccagcaacaattaaattagacattaccgcagctacaccaccaattaatccagctccgacaaacgctggaattaacggtatgaaaatattcgaaatggattttaaaattcgcttaatgggagtttgtttttgcttagctttttgtgcagcctttactttagcagccttagcctcaacgatttctttatcagtcataccggttgtatctatttctatattaggaaatgactcacccaatttaactccagcttctttcaccatttcatcagccactttatttacagttcctggcccgacaattacttggagggtgtcttcttcaacgactcctaataccccattaatatttttcagtttcttgatatctactttgtcatcatttctaatggtcattcggacacgagtcatacaatgaattaatttttcaacattttcgataccaccaactgcgccgtaaatttcacgtgcaattcttttaattttttcttcagatgtttctgacataagttctcacccccactttatattgtctttctaacaaaaccttttgctacctgtagcctcttttttgcttcatttaagtcaacattagttaagatcataacaatagccaacttcacatctttacccgccttttcaaacatatcattcgctactgtataactgacatccgttgctcccataataatatgttttgaacgttccactaatttagcattggtgggtttcacatctaccatcaagttcttataaacttttccaatcccaaccattgaggctgtagataacatgtttaacacaagtttttgggctgtccctgattttaaacgcgttgaaccggttaaaacctcagggcctactgctatttcaatgttaatatcagcatgtttactaattttagcgtgatcattacaagctagactaatcgttgctgcaccaacctttttggcataatctaatccaccaatgacatatggtgttcgtccacttgcagcaattccaacgacaatatctttattagttaagttttgagattgtaaatccctagcacctagctctagtgaatcttcagctccttctacagcaattgtcatagctttcattccacctgcaatcaaaccttgaaccatcttaggatttattccaaaagttggtacacactctgcagcatctagaacacctagccgaccacttgtcccagcaccaatgtagaataaacgcccttttttgttaaagctaaggataatctgttcgacagcttgtgtaatatctggtaacaccttaccaactctttgagctaccttttgatcttcagaattcattatttttaatatttctgctgtagatagctcgtctaaattcatagtttcctcattacgagtttccgttgttaaatcacttaaatcaatcatgctgctcctccttgtatacgctttcatttacagttacattttataataaaagaaataacatttcaaataaatattttattattctatttttaagaaatttaatttcttaaagctgttaaaagtactaacatattaattaattttgatattcattttttaaatatcacaacctacccccttctaaacttgcaaatatgatagtgtacagaagttctcccccctcatatactttagtttgttaaatcaaacttactaaaaatatttggaggtaaagttatgactgttgatgttacgaaagaaatgcaatttagtgatgcttttgcatatattgatgatggtgtagaacatggtgtccttagcccatttgaaaccaaagaattaatcctaaagaaaggcgaaaaaatcgccgaaggatttaaaccacttgatactgatatcaaaatgttaaaagatatccctgttaaattacgagatggagtaaccatctataccgatatttatttaccaattacaaatgacaaagttcctaccttaattgcttggagcccttatggtaaaagcgctggaactgcaccaagatataaaaatctttttaacatgcttggaatgggtaatcaatggaattctggattgactaaatttgaggcacctgatccagcctattggactcgtcatggatatgcagtggctaaacccagatatgcgtggaatcgctcatagcgaaggaaatacaacgatgcttggttcacaagaagctcaggatggttacgatttaattgaatggatcgcccaacaagattggtccaacggtaagacggccctaactggtacttcctatttagcttggtcacaatggtttattgctgctgaaagaccaccacatttaactgcaattaatcctaccgaaggtttatcagatgcatatcgtgacttggcctttatcggaggaattcccgacaaaaactttattgaacgcttagccgtaaatcatgtcagtgcaaatgatgccaaatgtgaggatttagctaaagaaatggatgctgatccgttagttacggctcccgtttggcaagacaaaattgcagataccagcaaaattgaagtccccgcttttgtgattggcagttattccaacacattgcataccatgggaacattccgagcttggcgcaccttaggatctaaagataaatggctcagaattcatgatcgtcaagaatggccttattattacgataaaaataatacggaagaacttcgtcgtttctttgaccactatttacttggcaaagataatggatgggaaaatacagctcctgttcgctacactaccattggttttcaaggcaaaaatgaaacagatattctagcaactagctttccaccagctggtgtgaataaccaaccattttatctcaatcccttaactcggactttgcaagaaaaacctttgtcacaggctgctacagtgcagtatgtagctaacgacaatcctgggcgtgtctcatttttaactactttcgatgcgccggtcacgatggtcggttatcctagggcaaagctattcatggaagtcgacgattacgatgatatggatatctttatcatggtacaaaaattagacaaatacagtaatgtgttaagtgagttcgttgtacctaatcacggtgcagccctccaagactttactcaagaaggtgcctcggccctacgttataaaggagtctggggccgtctacgagcttcaatgcgtcatttagatgataagatgagcacggatgagattcctgcatattcatttgatcgcgttgaaaagttggcaccaaaagaaattgtccaattagatgttgttttaagcccaatggggatgacttttactcctggcgaatcgttacgttttgtaatcagttccaagaatgaattaggttctgttatgccagggactcctggtgctacccctgacaatcaaggtatccatatccttcatactggtggcaaatatgattcctatttacaattacctatcttaaaaaaatagaaaagaatttagttgcttaactaaaggatttgtagtattaatgactataaatcctttttttgattggagtcacaatgaatttaacaacattagaatacttcgttcaagtagcaacagaaggaagcctaactaaagctgctgataaactttttatttctcaacctactttaagccgtcacatgaaaaatttggaagctgaattaaatactcaactatttgttcgtcaaagtcattctctaaaactcaccgaaaatgggattacttttttaaaagctacgacaaaagtaatccaagacgtagatgcattaaaacatttctttgatcaacaccaaacagctagcaatccaactcactaccttaatgtgggctatttagaaaattttcgtttagaaaaaatgtatgcagtcctggaccaaattagtcatgagaataatattcagttctcgctctttccagacaccccaactaatttatccaaaggtttatcttctggtaaatatgacttgatttactctttaagaccctataccactgacaatgtattgtttaaaagcacggattttttagaaaatcatcttcagattgcattaccaattaatcatcctttagccatgaaaccacaaccttcgttttccgatttaaaaaatgaaacttttattttattagatcgagataaatcaccaattattgtcgacaatgtgttaagtcaaggaatcaaaaatggctacaatttaaaagcaaattattatgttaaaaatttaagtcagggactttcaatgacagcattgggaaatggattagccttcctatattctgcaatgaatgacggccaattggaaaaacaataccatataaaaattaaagatttaaccgataattttggtaatcaaaatattgtgatcgcaatgaaacgttccgtagataatgcattgattggatctattttcgaaaaaataatcgatactaaaaaaaatagataagctagttaactagcttatctatttttgtattttcacaataaaaagtcatgctctagctctaaaaggtttagttatttatgaaaactcttacttcctaaaccattcgtttctgactggcaaaaactttaatatctgaattttctcattcccataacgaacttttatttttaaaatatgatccatccttcgattggaaacctctaagtattcattttttcctaaaatattattttcttcttttttaataccagattaaatgttaactttccgtgatactaattttgctgatctagctgttttagtttctctcagacataatagtattttgatcagcaatctttctaaagattaagaatttcgctactcacaaaaaaacttattacatttgttaattatctctaaaaaaactgagactaaacaacataataagcttttttaatccaattggtttcgggctgcgttgatttttttcaatacactaacggtgattctaatatcttgttcagtgaattgatctagtgcttgttctaagcgtcgttctagttcttgatgaaattggtgatgaacagcctctacttcccgacctagattggtaagccgcaaatacgtatccttttgatttcctttcatatgatatttttcaacaaatccatattcaacaagtcgattgaccagtttagatatggccccttgagtcatatttatataccgcaataaatcattaatttttaaattataatcggcgatccatgcaatcacatctagttctataatggaaagtttattcaggttctctatatcattgtggctgccaattaattctttaatggccctttcattagaatgttcgcggtaattttttagttccttagctagttcttcattcatttatattcctcgacatatatattgactttataaattttggtgctatattaaatatattccaaagaatataaaagcacaagaaaagagcatattatgaaaaaaataacaattgtttttgatcacccatatggaaaagaagctggttacaatgaaccacataaccgttcttttacttctgctctactagttgctgtgatacaggcgttagaaaaacaaagcgctcaagtagatttaattgacctacaccaagatcaatttaatcctgtaatgactaaaactgatttacttaattggcgaactcaccctttcgttgacactcaaagtcaaaactacttcgaaaggctccaaaattcagatgaaatcattatgttatttccaatttggtgggaaatgatgcctgcaatgaccaaggggtttattgatgaggtatttgccaaaggacaaatccaagaacatcgtggtattacgcgacgactattttcatcgaacaccaaagttagagttcttacggtatctggtgctccaacctggatatacaaagttctctatgggaatcctgttggtcgcatgttaaaacgtggcgtttttagaaagtctggtgttaaaaattttaaatggcataattttaatgccgaagacgtttctcctaaggctcgtgctaaaatgcttagttcagtaactaaatatatttaaattacctttttcccaattaaagactaaattatttttgatcaatattaagttttgatattggaaaataaaactcctattcatttattaataaataggagtttttatgtgtcactaaaaatttctatatttaatgttcaatagtcactacaccataagtttctatttcttaggtttacttcctttttaaaattgtgattatcgtagatagaattaatagcggtactagtaaaaaatatacaaatttgtttgatttcttctctccagtttgaggaagtttttgatattttttaattgcacgcttttgatggactgagttttgcttttttattttatcacctgattttatcagcgtatttagtttaaacttggttttatgtgttgactcaactttctgcctgtcatgatgaggtttaaggcttatttttttgtgtgactcttttcagtgttaatccttacctctcgatttgggtgaatcacccttactagaattattttaatttgtttaaacttctttggagaattgccaccaaccacctcattttgtttgttggcttgatataccaccgttttttcaacgtcttgatggtaactattaatattattaatcgccctaacaatctcagggattggtgtatatccctctatgattggtgaaaccacactcctaaaattagtaccgtcaaccgcttgccatactccataatatttttgacccgtgacctgatcaatttttacaattcgtctaaaactaagtttatttttatatgttggcttagctaattggccgtcatcatattgataataaattacttcttttaccgcacgttgttcaaaatccattttttctccatgttttagatgtacttcatacatttttattagcttatcttggtcgtaaaacaccccattttggggataatcatcactaaccaactcgtaggctgcccacttatattgattaatcgcatcgactgttcgataactatctcgagtgcgataagctccatttagtcctttttcgcttaatttttttcgagttgtatcatcatagtatgttacttgagctttttcgtcgttaattttgtatactaccgtttcttctatatctttatggctgccatcaatgttattgatcgtttcaattgactcaagagctggcgtataaccaataattttcggagaatctacttttttaaagtacgttccatcaattgcttgccaatttccatagcgtttctgctttgttacttgatcaaactcgataattcgtttgaaatcaagttcgttttcatatattggtccagcaggttgaccgttatcatatagataatgaatcacttcccttacagtacttttttctggttgcttaatgattttatgttttaaatgaatttcatacactcgaactaatttatcttgactatattttgctccattcttaggatagttatcactcaccaactcataacccatttgtttataatgctgaattgtattagccgttcgataaacatctcgactaccataagcaccatgtagaaattgctcacttaacgttcgccctgtcgtatcatcgaaatatttcacttgagctttttcatcgttagctttgtaaactactattttttcgatatttttatgattttcgttaatattaataatttcatcgatcaattttggtacagcggtatagccttttatatacggagaaactactcttttaaaactagttccatcaaccgcctgccaattcttataatttctttgttttgtaacttgatcagtttctaccttccgttcaaaattaagtacattttggtatatcggtttggctaattgaccattatcatagcgataatgaacggtctctttcacattccgtttttcaaaatcagactctattccatgcttaaaatgaacttcgtatatttgatcggttctatcgtcagtatcaaaagtagttcccgttacaaaattatcactaactaattgataaccttgttttaaataatcttggatgtctgctcttgtagagtacttcatcgttttaccaccctggccagttagtacatggactctcatgttagttccagtattatcgtcaatatacttaataaatgctttttgaattgacgtatatttcatggagtcaattttaaaaaattgtttagtaggtaatacgcctgtggatgaagcgatagtaaagtaatagacgggatctttagcatcataatcaaattttttcttaaaaataacatcccccgttggggtcgaaaggatcaccttaaattctttcgtacgagctgtatatatcatttttatagcgtggtatttattatcttcgataatttttggtaaaggccgtacactgtctttatcaatggtcccttgaccatttttattagtagttaccatcgcaccatatggatcgggaaaagcatcatcagcttcaccctgtaagcgcctggtagtgttaccaaacttaaacgatctacccacgttatgccatgtgtcagctttccatccaaaagcattagtcactccatagatacccaaattcccaccgcttctgccaatttggttacgggttcctttgtaaaaaacgatcccaattccgtctgcgattccctttataactctaaaaacattccttactttcgtttcttttcctaaattaattgcaccatcaattctaaaattgtgcctaaggtctattccacctttaaaagtgatattgccactttgccatgaacctgtagtaagcttttgctcaccggttattggattgtagttacctttggcactcccgttctgattaaaataatctttaaaattatctttgtttacatacacattatcctgtaaatctgttttatcatttggtttcactttaatttcactgtttataaaatttatatttttaatagtaccttgattttcattacttttcttaggagttattagagctctgttcttcacttttgtattttttagtgaccaatcgtccttaatagtttttggatcgacaatccgattttgattttttttaagtagccttgaagcttggttactatctgctcttttattagtatcattggattttgatgcttgactatgagtctctgtttttacatcaacacccacttccttagtggttttaccattcttagttagctctaataactgatttgtttttaaagaattagcatttttataagtattcacttttccaatctcggaagcctgagctacatctgcatgctgtagataactaataccaagtcctaacatagctaaattgatcaatgttaagatcctcttaggttcgagacgtggacaatatttctttttattgaacgttttaccaaactttgcagtcaatctaagtcactccaatttaattttaaatttaaaaacattattcattactaatcgcattattctaaacaaatgcgtctatggctatcctcccctcattaaaggtttaaaatttcataatgtgcttctgattttaatttagggtattaactgattgtaactatatttctttttaggatattatggcccttaaacgggacatattttttatatctaaagattatctgcataatttaactggggggattagtatggaatatgttcttaaggtaatgtctttagcaaactgttgcataccccattcgtcatctttaccagcattttgtccaacttcatgtgcgatatcaatcatcatcggagttcgaacaattcccggtgcataagcattaactgtaataccaaaatccgccaaatcacgtgctgctacttgagtaattcctcggacagcaaacttagtccctgagtaaagggccaaattagggtttccaacaactccggcttgagaagtcgcattgatgatttttccaccatgtcctaatttcttaaatgcttccgttgctgcttgaattccccaaagtactccacctacattaacgtgataaactttatcaaattgttctggtgtaattgtatcaattggtgtggtaggtcctaggccggcattattgaccaacacatcaagtccacctagttcctgaatcgtagtcctaacggcttcaaacacattatcacgttctactacattaaccacgattggaagagcccttccaccgttgctattaattttttcagcaactttgttagcagtttcagtattcatatctgccactgccaccgcaaatccatcgttagccaatcgggtcgcaattgctgccccaattccttgtcctgctcccgttactaatgcaactttggttttgtttgccatcatctttcgcctctttgaactattttattatttattttgcatccgcttgggccaccgccgtcattgctaacgcattaatataatttaacggttggtcgtagttaggttggaagaacatatcaaccatggataagtcatcaatcgtcatcttattttgaatagctaatgaaattacattagctgattgagcacagtcatattcgctatagaatgatccacctagaaccactcgtgtttctgggtcccaaactaaccgcattaggattggggtcgttgaaagcataaattcgggacggtagtcttgttctaaggttacagagtctacttctacaccccgtgctttagccgcaccaacagttaatcctgaacttgccatcgtcttaccaaagagtgctactgccgagcttgcttgtgtaccaagatatttcatcgttggtttttcaatgttatgtccaatcaaaattccttgacgaactgcattagttgctaatggaatgtaatcatcttttccagttggattataatgaacaacggatgaatcccctgctgcaaaaatatcagggttcgaagtttgcatgtattcattagtaataattgctccgttcttcaacatatccactttgcccttcaataattctgtatgtgggcggaaaccaacgcaaagtacagcatagtcggccgtgtaactgcctttatcggtttttacagtaatctgatcatcaccactaaatccttgaaccatttcgttcatggccaatttaactccgtgatcagtgtaatctttagctactcgatcagagatttcaggatcaaaattcttagctaaaacacttggtaatccatcaatcaaggttacttcgcggccagtcaaggcatattgttcagcaagttccgctccaatataacctgcaccaattacaattactgagttaatgtcaccatcaattcgttttaattccgcagcatgagcccaatttttgcaaagtttaactcgtttattatcgattccatcaatcggaggaataataggtgctgaaccagtagttaccaccaatttatcgtaagtatctgttttaatttcaccggtttttaaatcttttacttctaaagttttattatcggggtcgatactaagtacatcatgttccatattcatagtagcacccaacttagttagggcttccggtgatgaatagaacattttattaggatctgaaacgtggttacctacccaaagggcgattccacaagataaaaatgacaaattattattacgttcgtataccgttacttcataatcggggtgctcagttaaaatttgttgcgctgagaaggtacctgcatgtgtacaacctacaattgctattttcataattaactaacctcctatttgtctatatctaattattaagcgctttcattgctttgtcaacttaactctggtcctttagaacaaaaaaatgaaacaataatcgtcaagtaccgattatcgtttcattagtttaaatttcatgactgatttcaggatgataaactaatttactagttttttcaccaagttgctctagcaggtagacaactgggatttgcgatgtaaaattcaacgatcctactttattttcgggaatatcataagttaaactatagtccgcaatctgcgccaacgttgaagcactattagcagtaattgctacaatttttgccccattttggcgataataattggcctgcgttaaaacaccttcagtttcgccagagactgatagtaaaataatcaatgttttagaatagtcgcgttccgagatgggttgaggttggaaaggatcggtaatggccaatgtgagcatcccataattcgataaaattcgtgctccatattgtgccatactaccacttgatcccattccaaagaacaaacgggtgttggattgtgcaaccacgcgagcaacttcttccattttttcggtatattctgttgtagcagtctgttttagaaattgacctattggacctaagtcttggctcaattcactagcaggagtttgatcatttcgatggcgtaaaacatacttaaaatcagaaaaaccctcaaatcccattttcttcaaaaatcttaaaatggtcgtagaagatacgtgactctgcgtggataaatctcgaatagtcatggttttacactcttctagatgactagttacgtatttatacacaaacaattccaattgattcaacgtttgaactttttcataactaaacatcaacatcacctctttaaaacttgattattcttaaacaacttactataaatcttcaccattagatgcaattacttgtttgtaccaatcaaatgaatccttcttcgaacgttctagactaccattaccctggtcatcttgatcaacatagataaatccataacgtttagccatttctccagtacttgctgaaattaaatcgatgcacccccatggagtataaccaattaagttgaccccatctaaggcaactgctttttccatctctaaaatatgatcgtggaaatacttgatgcggtaatcatcatggacagcgccatcggcttctttttggtcgtatgctccaaaaccattttccacaataaattgaggtttgtgccaacgatcttgcatccaattcatcgaataacgtagaccaacaggatcaatctgccagccccaatctgatttttgaacataaggattgtcgactaaatcacgtgcttctttataggcatagtcggtattttcatccgtagatttagttgtaaatgacatatagtaactaaatccaatataatcaactgcaccctttttcaaaatttcacggtcttcatcactaatttcaacatggatgttttggcgttcccaatatttaggaagccaattagggtattcaccattagcttgaacgtctccaaagtagtaacgcgtttgcatagcacgttcagccatcatgatgtcttctggcttagcagttagtggataaattggacacattgcaatcattgctccaatttgatattccgaatcaatttgatggcctagttcaactactttagcacttgcaaccatttcgttatgagcggcttgatacatcatttcttccattcctggtgttccagctttaaccttaatggctgaatcttgaagtaaatgatgaggattactccaatcagtttgattattaatctcgttgaaggtcatccagtacttaacttttcccttatagcgtttcatcactgtttcggcaaaacgtacgaaaaagtcaatcaatttacgattagtccaaccaccatattcttttactaaatgatatggcatttcgaagtgtgacaaagtaatgatgggttgaatattgtattttaataattcatcaaacatatcatcatagaactttaaaccagcttcgttaggttcggtttcatctccattaggaaaaattctagtccatgcaatcgaggtacggaagcatttgaaacccatttcgttaaaaagtttaatatcttcaggataacgatgataaaaatcaatcccccagtgatttgggtaaacttctccatctttaataccgtccgttacttttcgagcagtatctttgtttccagcggtcatcacgtctgcaatgctaactcccttaccgccttcttgccatccgccttcaaattgatgagcggctactgcaccgccccacaagaaattttccggcatcttataatgcttttcagtcatgcttaaaacctcactttatttttcggccatttttttatataaatcaacaatttctccagctagatctctaaaagtaatggcgttcatgatatggtcttgtgaatgaaccgttagtagtgaaactttagcatggtttcccttagcttcttcagttaacatcccggtttggacgttatgagcttcagtcaaaaaaccatcagattcttttaatttttcatctgctttttcaaagtctcctgctttagcagcgttgatagcttcaaatgcagagctctttgcgttcccaccattaataattagtcccatgatcacttctagattttgttcttgttcacccattgttatgctccttaaatttatttatataaaaaagcgcctcaaaaaacgaaagcgctttaattcaaagcccaattaaacctatacacccattgatgttagagcttccttcaatactttttcaccattcatcatgccgtaatcttgcatgttaattacttctactggaatatctaatttttctttgaaattaccttcaaggtaacgaacttgaggtccaagcattaaaatatcaggattcttttcagccaatttattatctgcatctgatgcagctgttgcgaagatttctgcatctacaccttcagcttcagcggctttttgcattttcgaaactaataaacttgttgacatacctgcagcacatactaacataattgttttttcagccataacgagtcacttctgtaattttatttaatttggcggttgactatgaaaccgcttacgatacaattgaattataaaacgtaggtacaaattttacaagtaccaataattcaaattcgttaaaaagttatcaattagcgttactgataaggaaagaaggcgttcatcgttgtatacgaatatcgcaaatgatctcattgacaaaattaaacatcacctatttgaagaaaaattaccaactgaatacgaattgatgcaagaatatgatgttagtcgtaataccatccgcaaagcagtcgatattcttagtcaaaagggactcgttcgccgtgttcaaggtagtggctactatatcaacgattttggaccacgagctgatcaaaccattaacctaaccatgggagtttcagaaggctttaatcatcccaaactaacctcacgcgttatcactttcgatcgggtggtagctgatgaggctcttgcagctgaatttgggtgcttagtcggcgatgatttgtatcgagtaattcgttatcgttttcgtaatcgtcaagcatatacccttgaatatgcttattacgaacgcgaagaggtcccctttttaccaatcgaagctgcgcatgattccttattagaattcattagaaatgagtatggtgtatccgtcgatactagcgaccaatacgttggaattgaatctttcacttcggaagctgctttcattactgggctccctcaaggtgataaatatattgttttatatcaatcacattatcgtaaaaataatgtgttgtttaatttctctaaaacttattatttagaccgcaaaattcgattttatttccacgcttctaatcaaagctaaaccaacggattattttaaattaaatttttagttgacaaacgaaaagtattttagatatactcatggaagattaattcaaaagttggtaatacaaatgagtcttttacattcaacacatgtaaataatggttggcaaagccggtaattaggttgtaattttgtctaggcaagatacgacctgaatgacagatcgtatctgtgccggctcatttgtgacgaacaaacgataacaacaagcccgcatggattttatacacatccatgtgggctttttttaggcaaaccccatgggcttgctttttttattataaatttagaggagtggaacttgttatgaagagaatgcttagctttatcgccattatttttatttttttaggatatgcatttgttgctgaacaaaagcatacctcgaaccatcgaaatgagactaaacgcattggtttattacaatatatggatcagccagcgttaaaacaaattcaaaagggagtttatgctggtctaaaagagtccggttatacagtcggaaaaaatctcaaagttgattatcaaaatgctcaaggtaatcaaagcaacttgaagacgatgagtgaaaaattcgaaaatgaaggagttgatttatcaatcgggattaccactcccgcctcaatttccttggctaatacaacttcgactacccccattttaatgagtggagttaccgatccacgaagtgcttccttggtacaaaatttaaagcaccctgaaaaaaacatcacgggagtttccgatcaagcaccactagaagaacaattagaattaatccaaaaattaatgccaaatttaaaaacattaggaattatctacacatctagtgataattctgcaattactcaatttaaaaaattcaaacagctggtatctaagactggaattaaacttaaggcttattcaatttcaaactcgaatgacttaaaccaagtttcgcaaaatatggttcaaaatgttgatgctgtcttcgttcctactgataatacgatcgccggtgctacgtcaaccctcgttaagaatgctaatgctgccaacgtccccatctttccaaccgttgattctatggttaaagatggtggaattgccacctacagtgttaatcaatatcaactcggagtccttactggtaaaatggctgctcgcgtcttaaacggcgaaaaaattaatcagacacccattgaatttatcaagcatggtgacttaaccattaaccttaaacaagctcaaaaactaggtatcaagattcctaaagatttaatgcaagaagcacaaaagaaaggggaattaatcaaatgaacttaatcacatcttctattggacaagggctactctggggccttctaggggtaggactatttctcacctttagaattttagattttcctgatatgacggttgaaggaacttttccacttggcgcagccgttagcgttactgccatcactaacggactcaatccactgatcgcgacattacttgcttttctagctggtatgcttgctgggctaattactggcctcctttacaccaaaggccgtattccaatcctattagccggcattttagttatgacggcttgttactccattaatttgcggattatgggaacttctaacgtttcactcctaggaaaacaaaccttattcagtgggcaattctttgcgtcactacctaaattttttgatagcgtagtccttggactgatcattattaccattgttgtagctatactggccatctttttacaaactaatcttgggcaagcttttattgccacaggtgataatgaaaaaatggcgaaatccttagggatcaataccgatcaaatgaaaaatatgggacttatggtttcaaacggtatgattgcagtatctggtgcactcatcgctcaaagtgatggatacgcagatgttaatatggggattggaattatcgtaattggcttggcttccattattattggagaagtagtttttggtgaattaaccatgaatcaacgtttagtagccgtagtatgtggaagtattatttatcgtttcgtcctcctactggtactcaaggctggattcaatactaacgatttaaaccttatctcatcgttggtcttagcactctgcttaatgctgccaacgttacgaaaaaaatttcattttgaccgaattttaaaacatggggttaccatgccaactaaggagcgtgattaaaatggaacgacctgttattttagaacttaaaaatgtctcagtctatgttaatcgccacacgactgaagaaattcaaattttgaaaaacattaatctaaaagtctataagaacgacttcatcacccttttgggttccaacggtgccggaaagtctactttattcaatgtcattgccggtaatcaacccatcgatgaaggacagattttggtaaatggtcacgatgtttctaatatgtctgaagaaaaaagaactaaatttattagtcgcgtttttcaagatccaaaacttggcactgcccctcgcatgacggtagccgaaaatcttttacttgctactaaacgaggcagccgccgaaaccttaaattgcgccgtttaaagcagcatctcgctgagtttaagcaaattactgcaacgatgcctaaccgtttaagcgaacgtcttaaaacacctactggtaacctatctggtggtcaaagacaagccttaagtttcttgatggctaccattaagaaaccagctattttactattagatgaacatactgctgccctggatcccaagactagtgccgagttaatggaagcaacgcaaactcgagttactgaagacgaattaactgccctcatgattactcatcaactttctgatgctgtaacctatggcaatcgattactagtaatgaaagacggacgaattactcaagacttagatgccgttacaaaagctaatactaatattgatgaattaatgatttattaatattaactaagcaaacaaattccataggagtttgtttgcttttttgttcatattgtatatgctttataggggttattttcaaccctataaaaacgtttaacttgcgattatatcaacgattgtaaacggatacattacgtgttaatattagctcgtaagtaagaaaatacataagaagaaggcgtttaaaatgaaagaaaattttgatttccttatgcctagtgtcaacttcttcggctctggagttattgcaaagattggtgaccgcgctaagatggtcaatatgtctaaagtattgatcgttactgataaatttttggaaaaaatggaaaatggacccgttgaacaaacccttcgttcacttgatcaagcgggtgtcgattacgttatttacaacggagtagagcctaatcctaaagttagaaatatccaagaagcaaaacaagtttatttggataatggctgtgatggaattatcactattggtggtggttcagctcatgatgctggaaaaggtactggtattattttgacgaatggcgacgatatcaccaaacttgctggaatcgaaacgctcgaaagtgcacttccaccattgatcgcggttaatactactgcaggaactgcttcagaattaactcgtcactgcgttattaccaacgaagaaacgcatcttaagttcgtagtggtttcgtggcgtaatgttcccctcgtatcatttaatgatccaaaattgatgctcggggttccacctgctctaactgctgcaactgggatggacacatttgtccaagccattgaaccttacgtttctactaaccgcaacgatattactgatggtcaatgtctccaagctatcaagttagtggaagaaagccttcgtgaagctgtatctaacggtgaaaacctagaagctagaactaagatggtagaagctgaaatgttgggagggatggctttcaataatgccgatcttggttacgtacatgctatggcccatcaattaggtggacaatacgacgctcctcatggagtttgttgtgctatcctattaccaattgtagaacgcttcaacttagttgcttgccctgatcgtttcgcagacttagctgtcgccatgggtgaaaatatcgacggcctttccattagagctgccgctgataaagctattgatgccatgcaacaacttaacgacgatgttggtattccaagaagtatcaaagatttgggtgctgatcctaaagatttcgaactaatggctgaaaatgctttgaaggatggtaatgccttctccaacccacgcaaagctactaagcaacaaattgtggaacttttccaacaagcttacgacgcaaaataattactcaacaaaaaaagatgaactgagatttctgattcagaattcacgttcatcttttttatttatttggcaacttttttattacttttaacactaaaggaaagaattaatcctacgataattaatgcaatcgtaaagtagaaaccatagtgtgtaccattagtgaaggcagcattcaaatgacctttaccaaaatgattctgataagctgcttgtccgattcctaataaacttgttgctaaagcagttgcaatcgcaccaacgatttgttgcatggtattcatgatcgtactaccgtcacccgattggggaccttcaagcgaatttaaagcatatgtttgagctggtgacattgccaaaggacaaccaatcatcaaaataacatgagcaataattaaataagcaattgaagtatttaccgtagtacataccaacataattgcaccaattaatgcaatcactagtccaatacgaattggtgctttggcaccgatcttgtcgtataaacgtcctgcaaccgctgaaacagcggcattaattacaccaccaggaagcatgataattccagttagtgcaactggtaataataaacctttttgaatgtacattggtaataggtacattgctgataaaataataccaaaatcaagcataactaagattgcaccagttctaaatgcaggaatggcaaaaatctttaagtttaggacaggttcagcaagcgaaagttgacgtttgacataaaatgccaaaacgataattccaagtgctaagatacctaatacgattggcgaaccccagcctttttcactagcaaaactgacaccagttactatactagcaaagccgataattgattcaatcaatgaaattacatcaactttaggtttagtaagttcaccaacatcttttaatccaaaaatagctagtaacaaagcaattgctaagaaaggaacgaacatccaaaaaatccagttccatgataacttagctaaaataatacctgtcaatgtcggtccaatggctggagcaaacataattaccaaagcacacatgcccattgcagcacctaatttataaggtggaaatactaacatggctacggtaaacatcataggtaaaattaaaccagtagcgattccttgaatcattcgaccaaccagtaataatgcaaaggttgatgatagagctgaaataacagaacctacaataaacgctaataaaccaaaaataataatctgtctagttgtaaaccattttgatattaaactagaaaagggcaatactacaccaatcacaagcatgtatcccgtaactaaccattggatagtacccgtcgtcacatgtaaattgtccatcaattgtggtaaagcgatgtttaaagatgtctcactaaacattcccacaaaggccccaatcaacatgctcgccattaccaacattggatgttcaactggtactcgcgcttgcatcatgccgttgcttttttcttcattattcattaaaaaatacctctttcttcaaaaacatagcttgttcactatagcaaaaagaaaaaattttcgtaagtatttttttgagaaaaataaaaagaggccgttctgtaaacggtctctttctgataagaatgcctgttgaaagttatctaacaactaagacagaaattggggcatgtttagccatatacgaagcttgagaaccaaaatatttggccatccctgttttagaagatgaaccaattactaacaagtccggatcaacactaggaatcacattttttacaatagtttccccggcttcgccttctgctatgtatgtttgtacttttttaatgccaaatttcaaggcaatttttcgatagttttggagatgtttttccaattcagttcgcttttgcgtaatgaaatttttatctaaagcttggtaaatattaatgtcattttcttcaattaccgtaaccaaatctaactcagaatcatcctgtttagcacgattcattgcaaaacggaatgccaactgcgcatcaggggagtcgtctacccccaccagaatcttactaaatcttttcggattaaattctcttgaactcatgattttccctccatgctaatccctattatcattttgaatatggtagattatcaagctcggttcgaactaataaaacatccatcaatgcaactcttgtaacatagtccgctaccgaaccaatcattgctcgttggaaagcgttcaaccccgttgcccccatcataatcaaatctgttcccagcttttcaggcatctctgtagcgataatggccttaggatcgccagcttccacatatacctcaacatcttcaaaatcatatttacgtttgatttggtccttcaaatcttcaacatactctttagctctacgaagggatacttcaacataatccatgttactgcccatatgtccgtacacatctaaaaaccgtgaagattgaattacagttaaaatatctaagtgagcatggttacgcttcgccacaaaaatcgcttttttcaaagctaattcgcccttaggagagccttcaactggcactaaaatcttcttatattcaagcatatccattactcctctatacgtttctgttatcattataataaattttttaagatagcgctaccaataataccttagaaaaaagcgagtccccgctcttttcatttaaaattatcttaagaagcggtgagccaccattaccatttcttggttagtctgcacaagtccatcttttatccattgtacaaccatttggtttagtcctccagccacaaaattaacccacattactgggatatccgtccgaagtttaaagattccttgttcaattaaatctgttaaataaaagtttagtttatcatacaagcgatcatttaaatcagcatgaattagggcttcaatatacgaagcattccgccgacagattgagaaaaacgcttctaaaaaggtcccaatatcatgattaggacgtaccatcagatagttaaagaagtcggtaaaaatttgatctattttataatcaataatctgatctttagttttaaagcttcggtaatacgacattctagataccgacgccgtttgacaaatattacttaccgatatactggctaagtcattatcttttaacaactcaaatagtgcatcgatgatcttctgttttgttgcttcatgattagccattattatacctcacaaaattcgaactaaatatacttcatgacaaaagcccttcaagctatttacgatatgcttggctcggcttgattttgacgcaaccccaaataccgttggtccagtcccactcatttgagctgcatctgccccgtattgtttaattcgatttttaatttttaaaacttccggatgttcttttccggttacttgctctaaaacattgcccatataacgacaaatgtctgtataatcttcacgctcaattgcatctaaaattgattcgatattagaatgttggagctctttgtgttcgattttactaaggatatacggcgtcgacacactaagtttcggtttggcaatcaccacccacataggaggtaatttttttaaaggaattactttttcaccttttcccaaaacatgtgccgtccggctatacacacaaaatggtacatcggaatcaatttctaaaccaattttagctaatacttctaagctaagctcaagattccatagtttatttaatcctcgtaaaacggcagcagcatcagacgaacctccgcctaatccagctgcaaccggaatgtgtttacgtatttctataattactttggcacgtacgtgatatttttcttgtaaaatccgggcagcttgatacgccaaattacgactatcgttaggtaaaaaaccggtattcgttcgaactttaattcccattttaccaggaatactttcgatttttacataatccgctaaatcgaccgaggtcataatcatgttccattctggtaatccatcaggatgattaaacggcgtatccaaaaataggtttaacttggctggagctttctcggtgatttccatctacttcacctgtttcgtttgcttttaacctaaattatactaaaaaatggtaaaaataaaaaaggctaatagtcataaaagcttaaatgccccaactatcgccaatttaattagatattagtcttcatcaaattcttcaacgtcatcatcatcaagctcaattgacagctcagcttggtcgatttcatcatcaaagttaacttcgatgtttcttgtcaaaatatccgtgtaactgtatgacacacgttcgaaggagttctcgtcttgatccaaatctactacgaaaacggctggatatgtcatatgcaggcggccacgacgcttagtaatctttttacgtccgatttgagcaaccaccagtaattcttccccgatgcgaccatcgagcttatccttaattgtagctagtgtgtttggcattaacttcaccttcccatgtgaaacattctatcatagtttcacaaagtttgcaattttaccacacgtacaatttaatatcaacgctttacatttcatttttttatgcttcaagcccatgaaaacggattattttcgtttaaggccttcaatttgaatccgattatgcaatttaatgaaatccagcacggttaatcgctctggtcgcacttgtggatcaatacctaaatcatccaaaacattttggattttagctttgatttccggttctttaccataaagtccctgcatattgttccaaatatttttacgacggtgcataaagcatccgtgaaccgtcttaaagaagtctttgtcgtcttctggcattacttcccagtcagcacgaggcgtaagactcacgatggctgaatcgaccttaggacgcggcacaaataccttagaagaaacatcaaattcaatttgcgtattcattcgatattgaaccactactgataaagaaccatattctttgtcgccaggttgggctgtaaggcgttctgcgacctctttttgcatcataacaaccattttatcgatgggcagggtactagccataaatgtctttaaaatgggggttgtaatgtaatatggtaagttagctaccaatttcaaacgacgttttccgtctaaatgattttcgacttcttcgtttacatttgcttttaaaacgtcttgattaaccaccgtgatattatcgtaaggactaagggtttcatctaggacgttcattaaattacgatcaatttcaaatgctaagacatgatgagcacgtttggcaatttgttcagttaaactaccaattccgggtccaacttcaattacgtcatcctcaggagatacttccgcagcatccacaatatttaaaagtacgttagggtcagtcagaaagttttgtcctagacttttcttagctgataatccatatttttccaagatagctcgagttcgagttggattaccaatatccatttgattattcattaattcctccattaatttgttctacagcatgattaaaatctgatttttcaacttggaacagttgtaaccttttaggtagttgtttggcatttacgtatccaatccctagtaaatctcccaaacgaattcgccgttgttttgccgctgaacccgcaattaatccagcatcaatcaaatcactctgagtaatttgcggtgcagcatcctcatcttccgtgtaaagatgctcaagtgattggcggattacctccggagtggcatgttcgactcctaagcttcccttgtgatccggaacagcatcttttcgtttcaaaaaagcatgcttaacgttaggaacttcggctgaaatagttttacgaatcttttcgccagagaaatctggatctgtaaacacaattactccgcgactctcttgcaattggcgaatttgttcgatggtttcatcagataacgctgatcccctagtttccaaggtatcagcgttgacagctaggttgattcttttagtatcatcttttccttctactacaatgacttctttaattttcttcatttttaatcccatataatttacaagtattatcaaaagttatttcggctaattgatcaggtgccatatcacgatgacgagctaaggcctccagaacatatagtgaaaaagccggttcattttgttttccacggagcggttctggcgctagatatggagcgtcagtttcaaccataatgcgatctaaaggcacttggcgaactgcctcatggactattttagtttttttgaaacttgccactccactaaatgaaatgttaagcccgatatccaagaacttttccatccattccacatcgccattaaaactatgcataactcccttgattttatccgcaccagcattttttaaaatcgcataagtatcttctgtagcatcccgattgtgaattgaaattggtaaattttgctcgatagctatttgaagttgttcttcaaaaacttgacgctgaaccttttgaggcgaagtatcccaatggtaatccaatccaatttcacccaaggctaccactttcgggttttggagctgttctaatagttttattcgttcagcttcgtgaaaatcttttgcgtcctctggatgccaccccacaatggcataggtatgaggatatttttcggctaactgaatagctcgttcatttaggaccgtattggaaccaacttgagcagtcgctataacacctaatttttgggcatgctcaatatacttttgttcgttgccccaaaaagcatcatcatctaaatgcgtgtgtgaatcaaaaatatgcatttttgcctccttgaatataaaaagggctgggacaaaacacctgtttcatcaccagtcccattgtgttaaatctttttaacctaaaacatcgccgttttggtgttggtcgtcgaccatcacgacttttacttggtcgtcatgttcagttgataaaatcattccttgactcatttccccacgcatcttacgtggtttcaagttagcaacaatcacaacttttttacctactaaaacgcttggatcaggatatgattgagcaattcccgaaagaatttggcgtggttctccatcaccagcatctaacttaaacttcaataacttgtcagcaccctttactggacctgcttcaagaacttcagctactcgaagttctaccttatcaaaagcttcgatccgaatttcttttttctggtctgttgccacagcttcggcctttttctggttagcttcagccattgcagcacgcccttttttcttgtctgattgagtcatttggtttttaaggaactcaacttctttttcaacatccaaacgagggaaaattggagttcccttttccacaacctttgtatcagcaggaatttcaccaaacttcaaaccttgaagttcaagttggttaacatccaagcccaattgtgcaaagattttagctggcgactgagtcattatcggttggatcaaaattgcaattacacgcaaactttcagccaaatgattcatgacacttgctaatttttgtttagattcgtcgtcatcatttcgtgcaagaatccaaggcgtagtttcatcaatatacttgtttgtacgcgcaactaatttccaaatttcagctaaagcatctgcaaaatgaaggttattcattaagtcttcatagttcttaattgtcgtagcagctgtggtttccaaatctacatcaacgtcattaacgccactttggaaagttggaataacgccgccttcatacttgttaatcattgctaccgtacgattcaaaagattacctaaatcattggctaaatcaaagttaatttttgaaatgaaatcttccggagtaaagttaccatcatttccgtaaggcatagctttcaataagtagtagcgtaaagcatccaaaccatagtttttaacaatcgtttcagggtaaattacattaccctttgacttagacattttactgtccttcatcaataaccaaccgtgaccataaatttggtcgggttgttcgaggcctaaggcgtgcaacataattggccagtaaattgtatgaaaacggacaatttcttttccaaccatatgaacattggcaggccagaatttcttaaagttaccatcttcgtcactgctataacccaatgcggtaatatagttagacaacgcatcaatccacacgtaaatgacatgtttagggtcatttttaattggaactccccacttaaaaccagttcgtgtaaccgcaagatcttctagaccaggtttgataaagttattaatcatttcattcattcggcttgccggttgaataaaattaggatgagtttggtagtaatctaataaccaatcggcatatttgctcatcttaaagaagtaagattcttccttaactaattcgacttcgtttccagaaggagcctttccaccagttacgttgccgtcagcatcacggtaaacttcagctaattgagattcagtaaagtattcttcatcagaaactgaataccaaccttcgtattcaccaaggtagatatcgccttgatctaataatttttgaaaaatcttttgaactgctttttcatgataatcatctgtggtacggatgaacttatcattagtaatttcaagtaaatcccaaagttttttgatatcctctgccatgccgtcaacatatgctttaggagtagtgtttaaagcttcagctttttgttcgatttttaaaccgtgttcgtctgttccagttaagaagaaaacgtcctttccttctaaacgttgaaagcgagcttcagcatcacaagcaattgttgtataagaattaccgatatgaagttttcccgatgggtaataaatcggcgtagtaatatagtatgtgttattttctgccattatggttcctctattctagtcaagttaattaattgtaattgtatcatattttatagcgtcaaaaacccgtctctttaacgaaaataacgatttattaatcaaaacaaatccatctgaactggacctagaccctcaaagcgaattcctaagattttttgcaactctttcgcattatcaacagcatcatggtttccattattattgaagataatggttacttcttcaactcgttcagatactgccttaacccactgtgctaactccgttaattcatccgtagaataacgataattagtgcgttctttccgccattctttgccactcataaaccatccctgagcattacgtccgtgcaaacgaaacatggcttttttagcactagtcacttgaagtaccaaaggcatcccttggttgccgtcaaacggctcatcgacaattacatttatcattttaaggcgctccaaatatgataaagtgtccgattcgactgcctctgtgaaccaactgggatttctgaactcaacactaatcggaattcgatccatcatttggcgaatttcaaataagtagcggatattagtcaaatcacatcgaaacgaaggtggaaattggaataatacagattccaactgtccattttggattaaaggctgcattacctttttaaaattagtaaattctattcgtcgttctggtgttaaatattcatcctcatcaacgtcatcgtggagggtcataacccgagaagctttaaagatgaatttaaaattatctgggacttggtgttgccaattgacgacattggacaacgatggaatcgcataaaaagaactgtccacttccacaatcggaaagtggcctacatattcttctagcgttgatttaggtttaccttcaaccgataaagctggatgatcggcccaagtgcttagtccaatctgaatcataaaatccccccattaattaaaaaaactgaaattcaaatcatctgatttgattccagtctaatttatttttatttaaaaaacactaatattgctgaaataataatcatagcaatgttaacacgcattaaaaacaaatcaatgatgcggccttccactcgattagatactaaacggattaagaaaaccatcaagcctaagtaacataataagatcatgggtggtactagtaacattccaagtaatccaattaaaaatatcaccaatccaattttttcagcctgggatagacgccgatatgcaaaagtattaaccaattggacatgcttttgctttgcaatggtcaaacgatagatatcataaaccttaactaaggcggcaataaccgtatagacgaacaagaaagtccctgctacctttccagaaggttttccactaaaaaattcaaatccaatacctgatgctagcattatcaaagtactaaaaaagaagcccacaaattcttttgtatcagaaacttgattgactaccgattcttcagcaggcgttaatttacgaacatttaatagcatatggattagtgcgtaggaaaccgctcctgccacaattaacgagaaaaataaaattgtccaaaaattaatgctacctgttaataatttaaataagaataacccaattgaaactaatgagagaattccagcaatattagctgttcgattccatcctttttcattcatagtatttaaaatctccatagtataagtacataagtaatttcaattctaccatttaatagctctcctatctagattgattcgtcataattccctttaatccacgaactgttatataatgagaacaaatgaaaaggggtgggaatgatgagaaacaaattgtataaatccagaaacgataaagttctttcaggtgtgattggtggattcgctgaagcgtacgattttgatacaacgctcttacgaattatttacactgccgtaaccctctttaccggttttttcccagggttaatcctctacattgtagccatgatggtaatgcctgaaaggtaattcttacttttaactggatgcattgaactggcatctggtttttattttgattgttcatcaggctgaaaatcacaatttcataactaacaaaaaatcctgtaactaaaattactttagtccaggatttttattttatctaatagtataaggcatcttcatttcttcaaagaagtctttaacattctttgcatataattcacggaagtattcgtcacttggcatgtctttaggtgttggtaccacaaaggcgttttgttggtcgctaattcctaatccaacaaatccgcgtgtatcttgagctttttcatgtaaatctgaatggaagatttggaataattgtttaactgataaacgaagttgacgttcactaaatacacttcccaatgtcgcaaattccatcgcatgaatttctggtaaatcccattcttttaattgagtatcaattaattcgaaagctttgactacttttcgacggaaatcaaacggattactgatggtccgttggtcaagttcttgcataatttttttagcagcttggtaggttgttggaaaagcatccatcaaccgcgtttcaaagttcgctaaaccatttccatagaacgtaatggcatccatcatcattattagacgaatagtactaaatccgtcaactttaccagcatcctcagcctctacggcatcctcaatccccttaaagaaagcttcttccacctcatcatcgattaaataatgccgacgctgttctttgacgacaacttcgtgggcgattacatcgtaaagctcagtaatcaaaaacatcaattgattgtccgtatctttttcccctgttgataattggaaataaagttgtggaaaacctttcaaaatcattaacatgtgaattaactcatgggaagcagtgtaattaggcgctgtaatatcattgatcttgattaacatcttaccttcttcaacaaattgctgggcttggtcgtgacgcacaaaaccggcctgttcttcaccaaaaccaatccgtacttctcctggaaaacttgcattaacttcttcaagaagcgattttactgtatcatttacttcaactttgctcatcattatccttctttcttagctgtttaataatttgttgggcatttttggcatcaattctttcagcttggactaatcggttaaccgcatctcctagctctgcttgagtcgctccatgttctattaaaagtgatttagcttgtagtcgcatatgtcctgattgaattccctctgacacaatagctcgcaaagcggccagattctgagctaaaccaatcgcagcaattacttccgccaattgtttagcgttcttaatttgcattaattttaagttcagctgagcttgagtattaatcccaatcgaaccaccaacggttgccactggtaatggtaattccattctgccaactagttgatcaccaactacatcccacgtactaagtccttgatattgaccattttgagcagcataagcgtgggctccgctctcaatggctcgccaatcgttaccagacgccattacaaccgcatcaattccattcataatccctttattgtgcgttgctgcccgatatgggtcaatttgtgcataatcactagctaaactaatctttttagccacttctactcccagttggttgactggaatttgacacgtaacttctgtcagagcttggtcagctaaattagataatattgccatatcaacagcgatttgttgtgttactaaatctttcttaacagcctctaccatggaattaatcgtattcgctcccatggcttcgcgcgtatcaaccaataaatcaactgacagtttcgtggcggttaactgacgaacgcgtagattttttgcgccacctccacgagcttgcatcgaagggtgggctgcattagcgaccttcaataaatgtgatttttgtttttttacataattgattatgggggctggttgcgcactgctaattaataactggcccaacattatccgtctactgttcgccgaaaatcctccggctcgctggaccattttagctccataactagccgccgctattactgacggttcttcggttaccatgggaactacataagcttgaccgttaactactaaattaactgcgattccttctggtaaattaaaatcagtcagataattttcaatttgttgttgatgaattgagtccgtagctaattcagttagttcagacaaatcaacgtcagtttcctgcgctaattgctcgagttgctgttgacgcgttaatttgtggtagccttctatcattaaaactattcctcttttctaaaattgatgtactccgaaatgattccttcccgaacgccactttcagaaaaaattactcgatcagcgtcaatcatttgtaataacatcaccaatggtaacattccaccaacgataatatctgcacgcgtagtttcaagcccagacatttttttacgagcttctaaatttcgtgtaattaacgatttgaaggttcggttaaccgattcagttttgagccgatagccgtggatattattaattctagaaattttttggtgacgacgattcattcgggccaatgtccgattagctccgcctaagagaacaatgggtttattgaaagcatccataatccaccaaacatctcgtagttgcttattcacaaaaatttcagcggcaaataaattatctgctctaactacgtccgttaagcggaaccgttccgataaagacacagcgccaatcggaatactgatcatatttcgcgcttttccattatggacgtcaattagctcacagctggcaccaccagtatcaagtatcaaacaatccttaacttccaaggaattgattacacctaaataatcgtaataggcctcatcgtcgccagacaagacgtgtaatttaattccagtttcttgcttaacgcgatttaaaaaatcgttctgatttcgcgccattctaacagctgctgtcgtaatccctctaacttctgtattaggatattcttcataaatttctttaaatcgacgtagggctgcaatggtacgattcattgcttggggacgtaaaaggcgctcgcgccccattccttctgaaattcgtgaatcttctttaactcgcttaatttctcgaaaggttccatcatcagcaatcgaattaattgccattcgagcggagtttgatcctaaatctactattaccaaatttttcatcctggtgtcctcatttaaattgaaatattccttttttattttaccattacctaaattagaaaaggagctcatctcgcctatcaactaaaataaaaacaaacgtttacattaatccttaataaaaaaccacacttcttttagaagcatggcttttacgattaaagtcggttatcaaaatagttaattccaatggcatctcgaacttcctttaaagtctgttctgcgaccgcgttagccttgtcactaccgtcttttagaatttggtatacagcgtcaatatctgcttcatacttttcccgacgctcgcgaattgggcgtaattcgttttggagaacttcatttaagtaacgtttaattttaacgtctcctaatccaccagcttgatactgatctttaagttcttggactttttgcttatcaggatcaaagatgtctaagtaagtaaatacggtattaccttcaatatggccaggatcttctacccgaatatgttgaggatcagtatacattgacataactttcttttggatagtttcttcgtcatctgccaaataaatagcattacccaatgatttagacatctttgcatttccgtctaatccaggaattcgtcccattcctttaggtgggaaatatccttctggttcaactagcacttctttttggtagatattgttgaaagaacgtacaatttcacgcgtctgttctagcatgggttcttggtcatcccctactggtacagtatctgctttaaaggctgtaatatcggcagcttgactaaccggataagtaaagaaaccagctggaatactttgcccaaatgccttttgtttaatttcagttttaacggttggattccgttccaaacgagctacactaaccaagttcatataatgttgagtcaattcacttagtgctggaatctgtgactgcacaaagattgtcgatttagctggatcaatgccaactgctaaatagtctaaagcaacttggattagactattacgaattttttcaggatcacgggcattatcagttaaagcctgcatatcagcaatcatgatgaaagtttcataatcacctgtattttgaagttgaacgcggtttttaagtgaaccaacatagtgtccgatatgaagttttcctgtgggacggtcaccagttaaaataatttttttagatgtcataatttcctccagatataaaaaatcctactattcaaaaatgaataataggacgaaaaatcgcggtaccacctaacttgtgactccattataaagccaccgctctagtgaaagataagggatttcgccctgttaaacatcaatccatttcgccttccatgagacttctcaacaactgtctctctctgttagtggttaactactactttcattttaaattagaaacgttagccttgtcaaaataagtttaactttatctcacaagctggtctttcggttgactttcattcttcctccacctagaattattcaagcattaaaatcaaggaggtggctgatttggacgaacaacaacaagaacagcaacgagttacggaagtcattgaaaaaatcgacgaacaaaaacaacatacagaagatttatatcataaagcccatcaagaaactagccaggttgaaagaaattactcacaaaatgcaaaggttaacttgattgaggccgatgaccgcatcgaaacccatgctgaaatccaacagcaaaaagggctggtagctcgagctgtcgagaatgaagcaattttaaaacgccaaattgatgaattaagcgatcttcaaaaatcaccctactttggacgaattgatattaaagatgctgatggacctgatattgaatcgctttacattggaatttcgtcttttgctgatcgggatggtaatttcctaatttacgattggcgtgctcctatttcaagcatttactacaatggtactctgggaaaagttaaatatgataccccagcgggcatgatggaaactgaactcattaaaaaacgtcaattcactatcaatcatggtgaaattcaacatatgttcgacactaacgaaacggttggcgacgagcttcttcaacaagctttaggcgaacaaaatgacgaatacatgcgtaatatcgtcgctactatccaaaaggaacaaaacgacataatccgcgatgtttatagtgatcttctagtcgttcagggcgtggctggtagtggtaaaacctctgctatcctacaacgtatcgcctttcttttatatcatagccgaacttcattaaatgctgatgaaattgtacttttttctcctaataagttgtatagccgttatatttcggacgttttacctagtttaggggaacgaaacatgcgtcaactaaccttagccgaatttttcagccgccgtttggaaggcatgcaggtccaaacgttatttgaccgttttgaaaatcaacaccaactcactgaatacgagcaaaacctcatagactttaaagaaagtcaggattttattgaattaattcaagcttatgaaaaacaactttctgctaaagaaattaaatttatcaatattaattaccgcggcgaaattttcttttctaaagaacaaattcaagctatctttgaaacctttcctcttagtatgagcaataaagaacgtcttttaaaaactaaaaatgcgctaatcaaacttcttcaaaaacgagttaatcaagaaattaaacaggattgggttcaaaatcaaatcgaccaaattagcgacgaaaaatatcatgaattagtggggacgcgtcactttaaatcatatgatgaggaaaatcattttatcggtcgccaaatagttgataaagaattccaaattatcgatgacgctatctttaataattatttcatcgattcctattctcaatacgcggactttttgagtcaaatcgacttaggtgacttcgattggcaaaaagttgctaaagctttcactgatgcaattgaacttcatcagattcatctggaagatgcggcacccatgatgcttctccgtgatttgattactgggagtggtactaatcgtaaattccaatatgtattcgttgatgaaatgcaggactactcagttgcacaattaatgtacctaaagcatgcttttcctcgcgctaaattcaccttactaggtgatagtgagcagaccctgttcaaagatgttaccgaaccacaaattctattagcaaagctaaagcaggcttttcatgttaagcgagctaatttaattaccttaaatcgtagttatcgctcgaccgcccaaatcactaattttgccgcggcacttctacccgatggtcataaaattcaagcttttagtcgtgaaggagatttacctaaagtaatcattgctgataatgaacaacaagccgtagtcgatatgaccaatctttgccgggatgaattacagcagtatggtaccatcgctattttaactaagaacatggctgagagtgagcacgtagcaaccttgcttcacgaattaaaaccgagcttattaaacgatggcgaccgttccttacccaaaggcattgtcgttttacccatttatttagctaaaggattagagtttgattccgtaattgcctataatgtttccgaagctaattttcctggtcgtttgtggcgaggaactttatatacgatagcttccagagccatgcatcaactacacttgattagtattggtaaagtatccaatttaattacccaaattaagcccgatcaatttagttttcaaaaatcatttaacatcactcctcataaatcacaaaaactcgacgaataaccgtcgagttttttgtttacattacttcaattaatcctactccagcaatcataatgattaagcccgcaatcttagcaactgagatgctcgatttcatcgatcctaataagccaaactgatcaatatttaaactactgataatttgtcccagtaaaactagcactactaccgttccagttccaatctgaggtaccaagtatgcatttaaggtagattgcaaatttaatccgaatttttggacaaatttgtcagcataacctgatacggtgtttgccagtcgagtattttaagcggtcgctggttaatttggagtaacgtcgtcgttaaatcttgagcactaatgtgctcaaaacgagtccctttaggataaaaataacgtaaattccgattaaagcgttcattactaccacgttcagctggcgtataagcatggcagtaataggtcttaataccatattgtgattcaagtgatactagcccactaaactcagtgccacggtccacagtaaagctgtgcaccggaccattaaaagtggttaggaacttagttagtgcttcattaacagtcgctgtcgtccgatcttttaaccggtatgcccaaaggaaccgtgattttcgatcgattaaagttaataaaactgccttactatgcccacgaggaccaacgactgtatctagttcaaaatcgccgatgcgattacgttgattaatcatcatgggacgctgttcaattgatcgccccaaagattgattatatttggatcgttggtcaacgttacgccgttggcgtacgccatgttcaggtagatcattcaaagagaaaccaattctcccctgatttagccaattatagccctagttcacaaaaggtttcgattttaattcgttcggaataggttatactagacaaaagatcagctcctaaaagatgggtttgtggtaaacaccattttaaaggaagctgatcttttttgtccgaacagcgttcggattaattttacaatctaccttaaaaagatataagctgctccaaaaaaaccgccaatccaaacccaccaaggtgttttctgttgaacaactagccggatattttttaaagttccttggaatacagctaccaggaataacattattgttccaataaaaaatgatattaaagcagcgtgaataggggcctgtaataatccgcctaatcgtccatttaatgctgcttgaattgcgagcattccgcccacaagcacgccgaaaatttgccttaaccatttccacttaacccgttgttcagggggtcttttcatagaattccgtgctaaatattctggtaaggcgaccacaattaatacccccacaatcaatagtagaactccgaccattcgcattaacgaaagtggatggcgtgtggtgccaaacatgccatagttatcaattatcatactcatcataatttgacctaaaacgggcatgatcaccgtttgaacactacctaaaatggggaataaaagaatattagttgttaatccaatcatccccaaaacaccaccgaaatacatccaccatggaatggcatgtaattgcacattagttaataagagctgtccaccgcttaaaatgatgattactaacaaaaagatggttcccaccataaaagaaatcaaagacgatacgaatggtgaaataacatacgttcttaatcgtgaattaaccgccgtttgaaagggtactaccgcacccgcaaccaatcctaacatcaatagtcccattatgtgcttcctttcaacgctatcctagtttcggttaaagcgtttccatcattactataactttattttaaactaaaaaaatcatgacacaagcaacaatgtcatgactttttacattttccttttctattccacattgataacaatttttcctctagcatggttagtttgactgcgttcatgagccgctcgtaatccatcttcagtaagtggaaatgtactatcaataattactttaacctcgcccttagccactaaatcacctagttcagccagttgtttgccatttggttggagccaccaagaagttgctgaaggttgagcgtcctgttgggcttgggttgggcgacccgcgatggtgaccaatttcccagttggtttcaaaattgctagtcccgcttctaaatcatcaactgtatcaaaaacagcatcatactgtttaaggacttccccaattcggtgttcatggtagtcaatgacttcatctgcccctaaattagttaaaaattctgtatttttggcgctagccgttgtggctacataggctcctaaatgtttagcaatttgaatggcaaaaatcccgactccaccagctcctgcttgaattaaaactttatcaccctttttaacctttaaccgatctacaatcacctgccatgcagtcagtccagctaatggaattgcagctgctgcttcaaacgaaacattgctaggctttaatgctaatttatcttccttaactgccgcgtattctgcatatgtccctttcgtcccatcttcataaatatcgggtctagcaaagacttcatctccaactttaaaatgcttaacatctttaccgacttgggtaattattccggaaagatcccatcctaaaacaactgggaattgccaatcgtacatttgcttcaaaaatcccattcgagccttccagtcaatcggattgatactggttgctttaatttttaccaagacctcatcatttgcaatttgaggaatatctaactcctcttcatgaagttggtcaacatcaccatatgcgctaatcgtaattgctttcattaaaaatacctcgtagttttcctcttactttaagattaatctagtaggttatatgttaacacttatcaaaagtaagttctatattcggtttctagcaaactcccagaacaaatttacaactggtaccatgtctccctttcgttttataaaagctaattggctgctttttttaggtatgattggaattactgcaatattaggatagtttgttagatcaaatgatttatccataacaacagaaacacccattccttcattcaacatttccaaaatcaaatcaatcctttggccctcatacattattcgtggttgtacattaggcttttttaaaattggaataattggatttgtaccagaaattgttccttctaataccaaaaaagattcgtttctaagatcctgaacttggatcttttcaaaccgagacaaggggttatttttaggtactaatacaacaaaataatcggattcattcacaattacgtcgtatttttcactgaccggactaaatatccttgtaaaaacaatatctgttccctcatgattaagttcatttaacaaggaatccgttccggcttcactaaatttcaaattaatctctggatattgcttggtgaattgcgtaatcgtatcaaatgctgagtattgcgaaattgaggggattcccttaaccactagcgtacctttaggattatttttcaaagcatcaattttttgcttcaattgttgttctttatctaaaatctcccttacatctggcaatacatttaaagcctcttgggtcaacgttacttttcgatgttttcttgaaaaaagttttatgccccattctttttctaacgccataatatgcttagaaactgtagcttgcgttaaaaaaatttcttctgctgttttactataattcttagtctgtgctaaattataaaatgtcgctaattttttagtatccattacatatcttccatctattcttatttggaatatcttaccacaatatttgaattgttccttacttttatgaactgtagaataataccttgtcagctccaaaataagtacttaatcgatataaagggggattttggtgccaattggtataatagtaaatgttttttcaatttttttaggcggttttttaggtgctctaggtggtcgaaaaatatctaccgtcttccggaacaatgtaaatatggcctttagtatcgcttcaataaccatggggatttatacaattgcccctatgcaaaatctagctgcagtcatatttgcaatcattatcggaactggtataggaactttacttcactttggagattatattaaacatggagcagaatggatgcaaaaatttatttcacgttttgtttcttcaccaatgatgttagaccaagaaacttttgacgcaactttgataacgattattgtcctcttttgtaccagtgggactgggatttatggttcattaactgagggtatgaatggggacgctaccatcttaatttcaaaatcaattcttgatttttttactgcaataatttttgcagcaaatctgggatatgtggtggcgttaattgccgtccctcaatttttgattttaatgctactatttttcttggcccacctaatttatccactgactacccctgctatgttacttgatttcaaagctgctgggggaatccttatgctagctagtggttttaggattgttcaaatcaaaatgtttccaacggccgatatgattccaattatgattgtagttatgcccatatcttggttttggacgactatcatcctaccgctactatgaaaaaacgatgttaatttatgcacgtaaaaatcataaattaacatcgtttttatatattatttcataaacgctttaattcgccttactgcttcactcaataatgtttggctcgtcgcatacgaaagccgaatatgtcccggcattccaaacgcttcaccggcgacaacggctatatgagcttcctttaataaagccatcgccaagtctgtagatgtggcatatcctttaattttcatagcttcagtaacattcggaaataaatagaaagccccttctggcttatgatcaaaactaaaaccggagattgtttgcattaaatcaaaagtttggttcaatcttttttcaaatgccaatcgcatctcttccactggcttttggtctccacgcaaagcttccagagcggcatactgcgctaccgctgtcggatttgatgtcatatggccttgtaaagccaatatttttcgaataatttgcggagcagctacaacatatccaattcgccatccagtcattgcatacgcttttgaaaccccatcgattaaaatggtattattaacaatttcattccccatactcataactgaactgaattttgccccattgtaaactaatttaccgtaaatctcatctgcaactaatattacgttgttatcgaccgcccattgtgcaatcgcccgtgtttcttcttctgaatataccaatcccgagggattttgaggcgtatttaaaattaacaattttgtgctggctgttttaaaacgacttaattctgaaggagtagttttcaagtcactagcttgaggatggatggcaatcaccgaacccccggccaatttcacctgttcctcataactaacccagaatggggcaacgatcatgacttcatcgccttcattcaataaagcttggaaagtttcgaacagccccattttagcccctaccgttactgccacttgttccattttggcatcgcaacctgtatcggctttaatgtgcgtagcaactgcttggcgaagttctgggagccctccgactggtgtgtaataacttgctttaccagattgcatacttgccatcgccgctttaataatcgccttaggagtagcaaaatccggttctcccgtactcaaattaacaacgtcgatgccggccgcctgcattttttttgcctcaattgaaactgctaatgttgctgatggactaacttgattagcccgcttcgaaaattccatcagattactccttttctagttcaatcaataaatcccccgtctcgatttgcatttcaggggtagcataaatcttcttaatggttgcgtcgaaaggtgctcttaacgcggtctccattttcatcgcctcagtgacaattaagttatcacctcgctggaccttttggcccgcttctacttggacttcaatgaccgagcccgccatagtagcgccaatctgttcggctttagtcggatcagctttaatcttctttactttcgttacctgcgcattaacatcataaacaatcacttcttcactttgtccatttatatcaaagaaaagtgacctttggcccgcctcatctgcttcactaatttctcgaaggacaataatgaccgattttccgcgtcccaattgtaaatcaatgcgttgaccaatatgcatgccttggaaaaagattggagtatctaataatggtactggaccatattcattttgacgttgaacgtattcggtcatcacatctggatacataataaacgacataacttcttcatcacttgcttggtgacctaaaaccttagttgcctgtttacgaacttgatcaaaatcaactggttcagctaaagctcctggtcgtactgtcaatggggcttgcccttttagaatcaccttttgaagctgttttggaaaaccacccgccggttgtcctaaatcaccacggaaaaagtttaccactgattcaggaaaacttaattgtcccttatcgttcattaccatttcaggcgtcaaatcattttggaccatgaatagtgccatatcaccaactactttagaagaaggcgtaacctttggaatatcgccaaacatttgattgacggttgcgtacatttccttaatctcatcccaacgcttgcccaaatgaactgcattagcttgctggcgcaggttggtatactgtccaccaggcatttcaattcgataaatttcagtttgtggtccatttaattgggtgccaaatccttcgtaatatggtcgaattccagcccaatattcatctagtttttccgctttttgaatgtctaaatctggttgacgctggttattagacaacgcatagtaaagagattgcattgaaggctgagaagtcgttcccgctagcgcagaagtggcaacgtcgaccacatcaactccagctcgtattgcttcagaatataagaaaataccgttgcctgtagtatcgtgcgtatgcaaatgaattggcacatccagatgattttttaactctgaaattaatgcataagcagcttgtggttttaaaattcctgacatatctttgattccaataatatgagcacctgccgcttggagttctcgagccaaatccacataatatttcaaattatatttagtacgattagtatctaaaatatcgccagtatatgccatggctgcttcagccacttttccattatcacgcacccgttggatagattcttcaagctgtggaacccaattaagggaatcaaagattcgaaaaacatcaattccatttttggcaaccaatcgaataaattcgtcaatggcgttgtctggataattttgataccctactgcatttgacccacgtaaaagcatttggagcatcgtatttggcattttagcccgcaattgttggagtctttcccatggatcctcacctaggaaccgataagcaacatcaaaggtcgcaccgccccaaacttcagctgaaaataggttaggcagacctttctggacttgatcggcaatttctaccatatctttggtccgcattcgcgtagcaaataatgattggtgggcatcccgcatggtcgtatcggttagcaagacctgcttttgttttaacagccaattgatcatggcatcaggtcccttactatccaagatctgtttcgcattttcatgcggtacttgtgcttcaaaatgtggacggactggccgagttaacactactggattctgcttttctaagcctgggtaaccattgatggtagtattagcaatgtaactcaaaagttgagtaactaccggggtttcagcttttaaatcaaagagttctggtgtctcatccacaaaggttgtcggagctaattccgatctaaaaataggatgatgaattaatttctttaaaaatgggatattagttttaaccccagcaattacaaattcattgagcacccgatccatctttaccaaggcttcgtcaaaggttggcgcatggacaattgccttggtcagaagtgaatcataatgcggagttacaatggctccagcaaaggcatttccagcatccaatctcacacctgttccaccaggtgaacgatacgtctggattctaccgacatctggaataaagttattcattggatcttcagtggtaattcgggcttgaattgccactcccacagcttcaatttgggcttgttgaggaacaccgatttcttcgtgcaatctttggccttctgcaaccttaatttgggtttgcacaatatcaattcccgtgacttcttcggtaactgtatgttcaacctgaattcgtgggttcacttccataaagtaaaattgattaccttctaccaaaaactcaatggttgcagcgttactataatcgaccgacttcaataattttaaagcagcttttcttatttgatcacggacggtggcagaaattcccaccgctggagcaaattcaatgattttttgatggcgtcgctgaatcgatgaatttcgttcatacaaatgaaccatctcaccgtgttcatccgcgactacttgaacctcaatatggatcggatcaactaagtaacgttctaggtaaatctcatcgtcaccaaaagacgaagaagcttctgactgagccatcttaaatgcttcgcgcatttcttgttgatgatgtacaatccgcatcccttttccaccgccccctgccgctgacttaacaaatataggatagccaaattgctctgcaaaatttagcgcgtcatcgacatctttaactggtttttccgttcccggaatagttggtacaccggccttaatggctgcatttttagcttgtaatttatcaccaaacatttctagtaattcgggtcgaggtccaatgaacttaatcccagctgcttcaactgctcgcgcaaatacagcattttccgacaaaaatccatagccggggtgaattgcatcaatattattttcttttgcaatacgaataatgtcatcaatatttaaatatgctccaattggatcactatcttcaccaacttggtaagcttcatctgctttaaaacgatgcatagaaaattcatccgctttagcataaattgctacagctgtttttccgagttcatgcgttgcccgaataattcgggtcgcaatttcacctcggttggcaattaaaatacggtgcatagtggacctccctaattaaattgttcgtgatttaatgaatatttaatgttcattgtatcaaattaaacgggtcttgttatgtaatttgataaataaaaaaactaaacttagaatttgatgaaaattctaagtttagtttttaagcataagtagctgctttgtttttcttaatagcatccttcaaaataaacggtgcaatgagggtaaccaaaacaatcactaatacaattgctgaataataagtttcactcattaaatgttcaccataaccaatttgtaaagtaattagcgccatctcgccacgggaaatcattccagctccaattaccccactactagttaaatcaaatcccgacattcgagctcctaatccacaaccaaataatttggtaatagtggctaaaatagttaataccacaattagtcccagtacagtttgaagtccatcaaaattcattgataaaccaacactaacgaagaaaactggaataaagatagcataaccaattggttcaatgctctcattgatttcatcatcttcatcggttaacgaaacggctactcccgcaaaaaatgcgccgatcgctccgctcaaaccggctacatcagccagccatgctaaacctaaacaaataataatcgacatcactgggcgcgaagccgtaataaacagttggtctgaaaggcgcataagcatcggaaccacccattttccgatcacgtatactccaatgaagaataacacttgataaaagatggccatccccacgtttgaattggatcccgatttagaactagtcaacgcaatcatgacacctagtaataaaactccaataatatcatcggctacagccgcccccaaaatggtggccccctctttagtatttagggtgtgatattcctttaagacttccacagaaatactaactgaagtagctgaaaagataaccccgatgaatagtgcttccatcggatggactccaaaaagaaggctcgcgccaccgactaatacaatgggtaaaactacccctaatatcgcaactaccagcgccggcttgatgtattttttcaacattttcagatcactttctagtcctgctagaaacatcaggataattaccccgatttctgaaaacactgatatcaattcgtctgaatgaataatccctaaaattccaggccctaaaataattccgaccaataattgtcctacaactgcaggaaatcccatttgttgagcaaaatgaccagctaaaagggtcagtactaaaattagtacaagtacgcccacgaactccattaaaccacgttcctttcaaaataaagctaaattataacaatcactaattaagtatactacatatagcctaaatcactggcttccgtaggataagctaagatttgattgttgatttgatctactaatcccccttgattaataatcatcgttaaatcattaattagatgttctgcttcactactcattgtaattgcaccaacaatttttccactggacttttcatgaataacactaattttggcgaacggatcttgtaaacgccgataagtaaaccattccgtcatctccgctgtctttatttcatattgttctggatgttgctgcgcctcatctaattcaactcctgccttagccaatttaggcattccgtatactacggtagggattgctggataatcaatcgctgcttgggttgcattcgttagctttttagccaaataacgggcttcaaatccagatactggagtcagtttaggaagcgccttggaaacaacgtcccccatcgcatagatattatcaaccgatgtttccaaatactcattaactacgattccaccacgatcagtttgtacaccaatcttttctagatttaaactatcatcattgggttttctcccagctgtaacaaaaacctgatcaacgatttgcttgaaaccttgtccatcactcaactcaaaccgttcatccttaggttctacccgctttaaatcaattcctaagtgaacttcaactccttgagttttaagttgatcgattaagtcatcgacatatgctttaggaaaagcttttaatgggcgttgattatgatgaataatgtgtaccttagcccctgcgccactagcaatcatcgccaattcaaatgctatatatcctccaccgaccaaggccagttcatttggtagatgatccatctttaagaaatctgtactagtctgcatcatctcttgattttcaatatttgttaatctaccagggcgttgtcccgttgcaatcacaaatttttcactggcgatggttgtttgatcgattttcaaggtgtggtggtcaataaattcagcatgcccatcataaacatcgatttgagcgtccgttaaacctgaacggctgcttttagaaactggatctgtaaatgttttttcaaattgcattaaagccggccaatcaatttgagtctcatttttaattccattaccaagtaaatattgattttgttttttagcttcaatcgctgctaatagaacctttttagggtcgcatcctcgattgggacacgttccaccccaaagattttcttcaacaactgccacttccaaccctgcttcttttaaaggataagctaatcctaatccaccaggccctgctccaataatcacaacgtcatactttttcatttaatttacctccctcaatgtttggtttcacttaaatacctaaataatgatgcccggtcaacccaattaaccgttgatttatcttcatctactacttttaatatttctacttcagtcattgctgcaaaagctttttctaaagtatctttagcattaatttcaaatattggttctgtctcatgcggttctgaaatttcaaagcccgttcgaataattttttcaataggtgtcttatatagatttttacccaccgtagccgagaagaaattctccacaaacgcattttccggattctgtgcaatttcctttggggtggcgacttgcaataatttaccatcgttcataaccccaatccgatctcccagctttaaagcctcatccatatcatgggtaacaaatacaatcgtattcttcaacttttggtgtaacttcaaaaccaaatcttgtaattggtttcgcactaatggatctaacgcactaaaaggttcatcaaacaggacgaccggtggttctgaagcaatcgcccgtaaaatcccaatacgttgctgttcaccacccgaaagatcacttggacggcgatttcgatacttttcaggatcaagatcaacatcactaaggagttgatttacccgtctttttatatcttcttttttaaaatgtttcatttcagggattaatgcaatattttgttcaacggtcatcgtgggaaataatgcaatttgttgtagaacatatcctacattcagtcgcagctctcggagattgtaatccttaatcttcttaccattgaacaagatatcgccttttgtttgaacgaaaagttgattaatcatcttgagtgtcgtagtttttccgctaccagaagttcccactaagacaaaaatttcaccttcttgaactttaaaactaatatctttaattacgctatgatttccaaaatcctttttcacatgttgaaattcgatcattgttttagccactattttccgtctcctttcaacaaaccttttttaactaagtattgatgagccactacatcagctgatttcttttgtacattaacttcataattcatttcttgcatttccgattctgaaattttaccggctaaccgattaagtgctttgacaacttgcggatgtttattggcaaagctcgttttcattaagggcgccccttgatatggagggaaaacatgttgatcatcttttaaagtcgttaaattcaattgctttatttgactatcggtagaataagcatcagcaacattaatctgtccgtttttaatggcggaatagcgtaaggaagcctgcattgaacgaactggaaaatctaattcgtaagcctttttaattcctacccaaccatctttacgatgaataaactctaaggtcatgccaccttttaactgattttcaatattttttaaatctgagattgtttttaaatcatttttcttggcaaaatcctttttaaccacaagggcattcgtattttgatatttcatcggttgcaggtaatccatttggaactgttgtttcaataatcgttgggcatctaagtaagtttgatgcgcactcgttttttgagtaggggctttcttcaccaatgtttctaaaaccgttcctgtaaattcaggataaatatcaattttatttgattttaaagcgttgaataaaaaggtggtttcaccaaaattttgtttcaataccactttagttcgtggactttcttgctcaattaaatccttatacatattaataagaatatccggttctgctcctaattttccggcaatcgtaatggtttcagttttaggcattaccaatcgcgtgatagaaatcccagctgccccgatcactaatactgctaaggtgataatcatcttcttaattgataaacgctgaacgacgctgatgagtgcacttaatataatcgctaaaagggctgaactaattgccccaactaaaatcagttgtgggtcattccggttgatcccgagcagaatgaaatttcccaagccccctgctccaattaaagctgctagcgttgccgttccaataatcaataccagtccggtccgaattccagaaataatgactggcatcgctgttggtaattcaactcggaaaagtttttgtgaacgacgcattccaaaagcgtccgcagcttcctctaaggaaggatcaatttctgtaattcccacatatgtgctttgaaaaattggtaacaaagcgtaaattaccaatgcaattacggcgggtacactgccaatccccactaaaggaatcaataaccccagcagtgctaaagaagggattgtttgtaaaactcccgtgacttgtaataataattctgcaactttacgatgatgggtagcccaaattgctaatggcatcgcaattaaaatcgcaattaataatgatagaactgaaattccaatatgctgaagtagtgcctgtcctaactcacctttttgttcagcaaaagtttgtattaatgctctcatcttctcaacttctttacgcttatttaatatttaaattatctcataaaaaaaatggtatccctaacaaaaagcctggttagagggcaccacttagttaaaagttggtttttatttcagctggttcagttttaacgatgacctttccattgtggatcgaatacaataattctttccgttcgttaagttcattataaaaattatcagtgttaaaaattaaacaattagctggttttccaacttcaattccataatgatctgtaacatttaaagttttggcaccgttattagtagttaaattataagaattcataatttgcgaatatcccatcaattgagttgcatgaattcccatatggatcgaatctaacatgtttccgtctcccattggataccaagggtcttttatatcatcttcgccgaaggaaacattaacgttattttccaaaagttccttaacgcgggttaacccgcgtcgttttggatacgtatcaaaccggccacccaggtgcatgttaattaatgggttgcataccatattaatattggacatctctaaaagacgcattagcttataaacatacgcatcgttatatgagcccattgccgtagtatggctagcagtgactttattttttaaaccactttcataagctaaagtagctaagacttctaggtgacgtgaattaggatcatcaatttcatcacaatgtacatcgataagtttgtcatatttttcagcaagctcaacaatatactttaaggaatccacgccgtagtcacgattaaattcaaaatgcggaattgctccaataacatcgacgcccatttcaaccgcttgtttaatcaggtttttaccattttcaaacgataaaataccttcctgcggaaaggctaccaattgcaattccataaaatcttttacttcatcttttacttctaataaagcctctagagctgtaaaactaggatcggtagtatcaacatggctgcggacgaattgaattccatggctagcttgctttttcaacgtttgaatagcgcgttctttagtctcttttttagttaaggtttgtttgcgttctgaccaaatacgaattccatcaaataaagttccagtttcattccattcgggatctcccgctgttaaggtcgcatctaaatgcacatgtgaatcaataaagggtggtaaaagtaattttccattggcatcaatcaccttgtcaccagatgcttcaagatttttaccaattgctttaaaaattccattttcgattctaacatcttttacttcaggatcattttcgatatgaacgtttttaattaacattgctattcctcttttcaaactgcataattagccaatataaaattccaataataatcattacaatgaacgttgccccagtataggtttgaacaaagtccaatttctgtaataagctgtaaaaaattacgcctactaaccataaaataaaagccgtccagtggataccatttttataccagtatcttccgtttggatttcccaattccataggatcatatttctgttttgaaataaggaaataatcaaccaccataatactaataatcggtcctagaaccatacctacatagtccaagaaagcggtgaaggtttctaaaaagctaccatagaaaaccggtataaaagttactaaggttgcaataaccgtggtaatgagtagtgactgttttaaagttagcttagtgaacatattgtttaatgctgaacccgctgcctgaatattgacggcattggccgtcatgctagtcagcataattacaatcattgcaatgagccctaaccctaatctattagcaattgtacttggatcagaattattaggatcgtacacgcctgaactaattgcaatacttattgtggcacttaatccaataaatgcaaatccgaaaacacctaagtttgctcctagaaaaggtgcggtggtcgctgtaacagatttcttagtaaatctagtaaaatccgcgccagcagtcacccacgctaaattaaaggcggctaacgtgtccatggccgtcccaaaccccattttaagatggcttggaactttccaagcagcgatttggttaaaggatacatctttaaaaactactattgattcccaaatcacaaagataataactaagataatcccaattcgttcaataatttgaatggatttctgtcctgaaacaatactaattaaatgtaggatactcatcactgcgattcccataatcaatcccagatttccacccggttgaccatatacaggccatcccaagaagctgtgcaaaatatatgatacagaagtcgcagcaataaaagtattaactgctgtccaaccaacaaattgtgtcaaattaacaatcgaaggaataatgctgcctctaattccaaaagaagcacgtgacaacgccattgttgtaactccagttttggtgcccatataaccaactaacattaagaatatgtatgaaatactcgaagctaaaattaaggctttaattccgccccagaatccacaagcagcaataattccaccgatgaaccaggttccattgttagcattagcaccaacccaggttgcaaacatatcccaatatgtcatatgtcgatgtttcttatcaatactttctacttggtactttgtattcattcgcacagttcctcctagtattttttacacattttaaaaaattatactagattcactgtatacaatcaaagatgaattggttcaaatttaactttcaaaacaaaaaagaggatacccatgataataatcgtggtcatcctctacgtattaaaaatttatttttaagccactagtcggacttgaaccgacgaccccttccttaccatggaagtgctctacctagctgagctatagtggcatttatcaactaagatagtatatcatatttatttacgctgtaaaaccaaaatatgccatgtagcttaattccgtatcgggttatgctgacaaatttgtccaaaaattcggattaaatttgcaatctaccgaaaattatgtaagtatgatcaaaataaaatgctttgtaaattgcctagtaaagaatactttaaacgtttcgatgctcagattaacatatttaaatgtgaaaaatgtgaccacttcgaatcgaatgagtgtatgtgtgaaaattgtcgaaaaaattatagattagaaatcaaaaaaatatgttcgaataaagaaaaaattgatttaaatactttagtactagaagataggattttattagcgacatttctacaatattgtcatgtggactcgctacataaagatataggtacatttaatgaattctatgatgatgagtttccagctttttttgatgaaacgaagtatctagaaaagcttgcaagtaagaatattattaccatttcacctaatagtgatattgatgcatttgtaatggaagaaggattgatatctgcttactatatagggaaagttaagtggaatgttaatgtgagtacagaaacaattgatacaaaatacttactggaattcttaaaataccctaattattctttagtaacagatagccacgatgttaactttatgtggcgtgaaatagtaatttacgaattaatcagattgtgtaaaagagagatggaagaatttaagtttaataagattaatgacgaagaggatgaattatatgacttatttgttcggctctctgaatggctatcaccagctcaaatttattcattgatctggtttagtgttagaagggcagataatcagaggactaataatacatggggaaactataaatttcatcaagttgagtttattattaaaaatattgaagaaacagctattcaaagacaccaaaaaggtaaaattttaaataattatgagtatccttataaaactaataaaacactactaactaagatattttttgaacaattattacaaaaaccggattggtttgatacaagaataccaagtctagaagaaagaaaaatcaacaagaagataattttttacgaaaatttaaagcataaagaaaaagttaactttaatgaagatgatgttaatgttgggtactattatttaactaaatttggaatagtaatttatgatggtaatgtaaaaaaactttttagtaacgaggagacgctatataaaatatctaagtttattgataaaacagatgacattgtagataaggatgatgaattttattctaatttggatatactattctatatagaaggggtatattcattatcatacttaatgggaatgattattttcttggaacaaaataactgttgctattacctgcctgaagaagacgaaaaagaaattttatggattgaggaaaagttatcaatgtaaggtataaaattgataatttagaaaaaaactctttaaagagaaaaaatacacaagaaatacttaaaaactactcttaaacatagtaccacggcaattaatttgaattacgtactgtcatttataacagcaagatagttttatatcagaataaagaaaaacaaaaaagctgatacaccaaggattacaaacccttagctgtatcagcttttcctattcaatggagtcggcgggttttgtacccgactgctcacaaacgttgatataccaatgttttacatagctaattcaaaaattggctaagcttttggctatgttttataaaaaatatgcttgtgaggccacaatttaattgggtctagaatttttggtgttggaaagtatttccattccaaaagtactaggccctttttgataacaaaaaggcatctaagcctccctagtgctatgctttaagcgacgaaactcaagataagcggggtagttataaatttctccgttaaaaattactgcttttgatttatcttcattgtaaataggttgcataccactgttgatatcaatgatactcaatcgacgaaatcctagcgccgtatcctcattaactaattcccccgaactatttggaccacgatgtttgatcgtatccatcatagcttctataactggctttttgtcagtaatcttcttgtctacgaaaccgacgataccgcacataataattctccttaaatttcaaaacttacgaatctggttgctgcaccatatccaaatatttggagcaacattttgtcgggattgatattaatgaaatatccagctaattcggaaatctgattatatcggcgatcccattttttattataatcagtcgttaggccatgttttttacccattaaggccgaacaatttaatattatatgattaatcccattaactttgtagtacttttcataatgcatgtgtccacaaatgtaattcgatatggtcgaaataccggtatcagtaaagttatagcgaacattaactccaaaagcatcggataatttatttttaagttgtccagaatccttattattaaagctagtaaaaatcttctgaactaagtcaccgttgaagttcaaagctgaacgaccactttgactgatcaaattagcatgaccaaaaactacgacatgcttatcaattgtcttttctaaaatagatattaaatcttcgatctgttgctcgcggataccacggacttttttgaagtcgtacttcttggtcccgccatttaggatataaggaatatcgctcgtattcaagaaaattactcgaatatcccctttatcgatccaagcaactttggaaccaagactcaagcgtttgatctcaggttgttcgaaatcatgtttcgttaccaaattatagtagtcgtcacgtctaaatgaggctgaagtaataaatttgtgttcatcatacttatcattttcatcgtgattaccttccagcacataaaaaggacgctggctattttggtaattttccatcgtgaattgtaacaatcctcgactgatctctggcttatcactaccgtcgatcaaatcgcctaaatgaatattgtaatccactggcaatgaatcgcaagccttattggcttcaataatatgccttacaccgttgagaccatagtacgatgaactggcaacagctttttcatgagtgtccgttaaaaccgataaagtcaagcaattttggctaacgttaggttcaacgttctttctaaaaacttgctcgatatattctgtaaaaaacagtctcggctttaattttctcaaaaagttatcagtttgaacagagataaattcagatagtctcggtctaaaaaattttttaataagaaatttgattttcacgatttttattctcctaattgactaaatcttatcatgttttagactccgacaaacaaaaaaccatcataaaagggctctttgtcaacgggtgttgatggaggatttatgtggaacttcgttcacttgcgaacggggttccttttctttactctggttttaaattcaatttgaatacgaaaaacaaagtttttccagttccggtatccgtatgctgtctgcttaatctgtttaatctttcgattgacgccttcaatgggaccgttggaaagtgtactactggtcatattttggatgagctttttatttttaataaacgttttgatggtagtaaagagttgaggactaacgttctcaacctcatcaagcgtcgcagtaaaagctgcatagtctcggttacgaaaagcttcgacgagtttatgagcggtgaagtaagtattttcaaactcatgactgagatttaaaccagaccagataagttgttcttgagtcagtctgtttcgtaaatgtgaaaaccattgtggttgacttttctcaagagcttcataattcataagatacaggcgccaatacggttttaacactcggtattcgggggtatctgggtgatactttttcattaactggacacgagtttggttcaaggctcataaggtcatttgaaccaagtgaaagttgtcgacaattaatttggcgttaggaaacagataacgaataacagtttggtattgtgcgttgagatccattacaacctgagtaacctgttcacttgctttcaattggttttcgtcgacttgattgtagcacagggcagtatgccctttttattttgttttacaaaaaaggcgtcgatggattttatccatcaacaccaaatatcatagagccattttaaaaagggagaatggaaaaaatgaaagactgatctaaaaaggttggtcttttttgtttgtaaaaagcaagagtgaaattgatggagttagaccagaaagagcattgatgttgtggatatatcatggatcaattagcgtatatacagtggacgtatgaggctgtatatgatgggtacaactactatcattgttaatgattgtaatggtgctaaatggctatatattactatgcttatgggtatgcctctctgtgcctgccttgttctggtctggtctatctatatgagcggtctatatgtcaggcagttagctatatactgttgtctggtctgttgtggtgctctggtatgcctttgtatagatatgtaatagacaagcatgtaagctctattgtgctggtatatagctctgttgtggtgtgctgttgtatttgatgtgtgcaagactgtgaggtggcggtctgtgtggttgcctacgtggtgctggtgtagcgtggttgtatagtgtgtggttagttgtgtctacggtgtccgtggtgttgttggttacgtgcgtgtgtctatctatgcttgtgcttgctatggtgttgtcggtctatgcttagccatggcgttggtatggttgtctagtgttcctatatggtgggttaggtgatgatgtgatacgtatgttaatggttgtctatgctgatgttatttgcctataagagtgtgacttggacagtgtgagacttttcaagcttcaaaaatcaaatgaaaaatgaaacgaaaaatataaaagtggtggctctgattgattataatcaggactttttttattatacatacattggataattatacattattatgaatattaatgtggtaaagtgggtccgaagagattgagggaaacaagaacataaaaaatacgatgatttgaaatttgtacggcttgaaatgctgatttaatagggcggggggtgatttagaaaaaataataaatattctgttaatgccacgcaaccttttgtatacgtacaaggtaccacatcaactttttaggtttatttatgtattaatgcatccccattttttgtgtaaaaaggggatgagtatttgttaattagttgtttcaatctcttcgataatatgtcgtacattgttcctatcgcaatcgtgttcttttttaaattccctttggctcaaattaaaagcatcgttcttcaatattttgaattttcccacgtcatcagagagggtgttttctatttgctgttgtagccggcccgtaccttttctattttggcctccaatttttcgaccattcgcttgggattgattaataatatctttggcccaccttagatgtgatggtaagttgccattgttctctaagtagtcacgtaatctaatggcaaagttttcttttgaccatttttccacgtgttccccgagtgtattaagattgtacaattccatcaagtaatcttgataggggttaagatcagtctccccgaaataattagtacatgcatttttaaccatattttctaaagctctgttgttagaatacaattctagttgcttacgagcatcccttcgaggagtattcagcatggtgtcatattcttcgatattccccaaatataaccaatcttttctacctcgcgttaatccagtatgaaggttgttaatagtatagaaatcatgactcatgggggaaataggttcggaacccatgtagaaacacactcggtctgcttccattccctgtacgttggccaccacacaaccacatgtgaactcgtattgttcagtgcctgccaattctgtgtctaatgttggtatgcttgggaagttattttgtaagtcttcaatgttagtatgatatggattgaggtgtacatcagactcatcgtcctttttagcaacaaaagggaaatcgttaactggcttgcaattcccagaatttgcaagtagtctattcgcttcgtgtatgcggtcatattttgggctgagaattagccacccctcattaaggcacttagacagatgtttgccgtaatttctggtaaaagagtgttcgtttctcaactcttgatagaattcttcatcatagtcatcggcttcccagtctgtgcgctccatgcgataattgcgatatagcgttctaacttcaatagtgtctacagtgttgttccaatcttcgaccacattaagagtatttttggttaacaggttagaatacagctgacccatccaatttctataggcactatcatccgcattgttgaacaggtgcctattagccatccatatggcatctaatgcaccgaacttattaataggggggagctggtggctatcaccgtaacaatagatattaacatctttcccatctttttctttgatattcctaacatggaataacaatgattcgaagtctattttcgacaactctccaaactcatcaataataatattagttgctttgtattcatcaaaagatgaaaagttaacgtgtgtttttctttgtaattttttggctagatcggtgttatccatattattgaggctatcccttagacgactacttgcagtatggtttggagatgttaagaatacatctgtgttatttatgtcatccaacgtattacttatgttagtagtttttccagtgccagcgttaccgacagttaatattaatttcacttttcccgttttcattaattactattctcctgaatttgatttaatcaccttaagaatttggtgatttgttaatatataacagattaagcattttcttagattaatatagtcacttttcatattttcgtagaaaattgaaaacctttttactttttgaaaaaaagtgaaaagacagcaactactagtactaacccataacaattaataatattgaattacagtactagttaggttatcaacttgcaaaaaccacaagttaataactgttcgagttatcgctacgcgaaactcgcccatacgatatctaatattaattaaaatctaaatggtaacttatttcgctcctgtgccaattccttatctcgtttagctttatctttttcagcaataaacttatcaatcatagtcataaccttagctttggatactggtttgatgcgattatccactttgggaaggaataccttagtaggattttttaattcaatcttgctaggcatagcattggagaaatgtggtttatttggaatgcgagcctcgaacttaatccaatcccatttttgcaatagtcctaatttttcacgtatttcttttgtataggtaatccatccaaaattaaaaaaattgtggttatcgcttccaatatttctcagatagacgatagggcgcctttctcctgtaattgattcaaatatgtcaaatcccactactgtagcgtcaaagtattctcttgtctgattcatcaataatgtcatcccttttctgtattttttaaaacataacccttacaaatgttgatataacagcacttataggcttgtatttggaataaaacattcattttattggctatttttagcccttttaagatagaagtctttattttcctctaatatatattggaggaattcccaattggtttctggtactgattgaggctttcttttggttagtaatctaactttagaaggatattctaatttatagtcatattgaataggatgttttttcttatggtggagtcattcccttgataacccttgagataactagacaccctagcattgaattgaacttcatcacctgtagccaaaatacccaaactttgaaattgtttagtgtaattaatccacagatgatcagctactagatttccattaatatccgttaaatttattatcaaaaaggtaggcttgccatgcccgttgtatccagtcttataacccagtctgctaacaactcccacatatgttccgcgttctttatttcctatttgcttaagtgcgtctctcataatatttactccttaaatttttttatacttagttaaataatttttattcttaaataagcctcgcaagcgtattttttattaattaaatgattttattcttcaggtattcatcgatggctaaacggtcaaagcgtagaacacctccaatctgcacggcgggcaatccttcggcaatagccttctggaaagttctgtaacatattcccatgtacttgcatgcctcctttttattcatgtatcgaggtgctgggctaaacataagagagagttgttccattaattccttattgtcagttatttgttttaattccatctgcaaacctccagttaatttttaagccactattacgtgactatgtatgatgcgctttatatagggtgcgaaaagagtttcaagtaaaaaatattaaaaaatacctttacactactaatatggataaaaaaacgagaatatgccaaaaagacataaaaaaacataaaaaaacatcaattagatacaattccatttaattccgtacacttataacatggggtaaaaatgtagtgttttactaaaaaaatctaataaaatttaccttacatagataacatagtgaaaaaattttgttttaagtaaaaaatattaaaaaatatccccatgtctatatatgtataaaaaaacgagaaaatgccaagaaaatacaaaaaatatcaatcagatacatttctgtgtcactgcagataatatgtataaaaaaaagaaatctcacaaaagaattgtaaaattttttaaatttattttttgagttgcctaaacaaagatttcaatgtaccatgtagctgttgcgggtctgactctgcaacacgggaggtcatcccaatattttcaaaaatgtaggcctcgcaagcaatacaggagcgaaaattaaaatggcaaaaataaaaaaatacacaacaaaaacaggaaaaattagatatgaatttcaggtgtacgtgggagttgactctctaaccggacgccaaaagaccacgagaagacgtggctttaagacgaggaaagaggcctccatcgtattgagtagattagaattggaaatcgaaaaaagaggactacaggaggatgagagacgctttttcagggatgtttgcgcggagtggatggaacagtaccgtttaacagtgcgagagtctaccttagagaagacccaacggattatcaatatccatgtactacctgccttcggaggtatgataattaataatataactccgaacgtctgccaaaaagttgttaataagtggtttttggaggctaagtcctacaaaaaatggctgaattacgcttcgatgatttttgattacgctcttagagctgaatatgtaagtcgaaatccttgcacgctggtaacaatgccacgagtacaggaacaggcaggagagaagctagaaaacttttggactagagacgaactgaatacctttttcgactatatgacccccaaaagggacgttgaacaattcaccatgttcagattattggcttattcaggtatcaggaaaggggaattactggcgctaacgtggaaggatatcggctttgaaggaaacacgttacgggttaacaagactcttacgcaagggttaggtggtaagttaatcgtgcaacccccaaagagtagggctggacgccgtacaatcgacttggatgacagtaccatgcgatacctcaggcaatggaagggtgttcaacgcgagacttttctggggatggggttcaatactaacaatactagtcagttggtattcgcaagcaatagaaatcattttcgctccatgaatacccccaccaaatggcttaataaagctattaaagccacgggactcaaacacatctcaattcacgggtttaggcacacacacgcctcactactgtatcagtctggagtaggtcttaaggagactcaacagagattgggacactcaagagcagacagtagcgttacgctcgacgtgtacactcatacgacagaacaacagaatgtagcagctttgcagaggtttgaaaattacgttgaggccaaataactaaaattggctaagctttatagaattttttgtaaaaaataagtgctttaaaccttgccataataggaataagtagcaaaaaaattggctaagcttttggctaagttttaggtcaattctgtgcaattttaagcaaaacatgaatatttagaagtacaaaaaaatcccgtcatatcaacgttttaacgctgtatacaacgggaaggaatagcaaaaatggagtcggcgggagtcgaacccgcgtccaagcatgtcgccaccatgacatctacattcatattcatactacttagatttcgcgaattaagacgccgtatgtcagggcttcattaaaacgctagtctgtaaatcctcttcttaagcacccaggccagtacttaagcgcaagtccacttcatttaggacccgtatctagcccatggacgagactaggcggatctacgttaagctactattaggcagctaaagcgtaagaattgttattattttttgcagttataataaactgaacgtttttacgtagccgtaacctacgaaatgcagtcatggctcgacccatacctgtcgaatccataacgaccccaaaataaaacctatgatctattatatcataggatgccaggttttaacggcgatttttatcgttttcaatcggaattggtcgataagctaactgttgttgaccttggagattgtttaaaagacggtcaagcaattctgaattttggaggttctttaaaaggtaatccagcaaagcatttttagtttttttcatgagaaattcctccttctatatgcactcatcataatacatgattcaagaaagtcaagcagttttgcctattgcttaactattccttaaatgtcacaatttaagtaactaggaaaagaggaggagagccatgagccagattgatgaaattcatcgagtcgagattgagatgttaaaagttattatcgaaatttgcgataaacatgatattaaatacatgctaatcggtggaacattgctgggggcgatccggcacgacggatttattccatgggatgatgatgtcgatctagggatgacgcgtgaaaattacgacgagttcgctagggtcgcgccagttaagttccaaaatacacattactttatgcaaacagcggatacggatcccaattttgcatttagttatatgaaggttttagatactaatacttatatagaagaaaaaaataatgttaatgatgcccacaagggaatttttattgatatttttccttttgataaggttcctcgtcaacctgaaattcgccaggcagtctacaatcgctttaagattaatgacgccgcaattctcgtgcgactagggtacaacattatcaaaacaccgttccgtaaagcgcctaacgagaagcctttagagttgttcatgagtgtagccaagttaaaagagcgacgtgaaaatatcatgcgcctgtatgataatgaaccatttcatcattataaaaattatgcttctcagtacgcctatgataaagaagttttaagtcagtccgaactaacggaactaaccacgcataagtttgaatccattgaagtttcgattccccaacactatgaccgtattttgaaacggatgtatggtgattacatgcagctgccaccagaaaaagaacgcgtttctaagcacattgatacggtgattattaatggaaaacgaatcgaatagaaccgaggaattttaatggaaaaactaaaagagcgcatggatgcgtttagtgacgcggtcattgcgattatcattacaattatggtattggaattgccaatccccaagcatgatttatttagcgaatatatgcaatttgataaagcagttggaatcttttttattagtttttgttttgtagcaaatatttggtaccaacattctatgttatttaatgatgcaaaaacaatgaatgatcatatttttattcgggaattcatttttttagctttcttaagtttgatgccaatttttacaaaaattattacttacgataccaatcggacaacggttttagcctatggaattttaaatattattgttaatggattgtttgtaaggcttagctatgcggtcatcaaacaaaaatataccgatcaacaagatattaaacgtatttttcataaggtctacggtaatcataataactttttgggttatgccagtattaccatcttggttttagcgtactttttccctaaagcgatggtggttgtttacttagcgatgcccgttatttcttttgtgacgacacgccatgattatacggatttacaagatgtcgcacagttacctaaaaatgaaaaggaacagttcttagagacgtcaggtagtagtcttcgtgaattgcgtctgatgcaacgtgaaattatgcgtaaatatcgtggaaaaggccgcaataatcctgaaatgcaggccgaactaacggcactattccagagtcacccagaattaaaaaataaaagaggccgtcgcttttaatgcgacgacctcttttatttaactatcttgacgagtggctgcgattgctaattcacggatgttaaccgcttgtggcatgtcataaatgaacttaacactttcagcaacatgtttaggatccatggtgatgccacccatactctttttccattcgccataatcgaccaaggcattttggtcagtaacgtgggtgaggagttcagtttcagcagcgcctggggcaaccattgagattcggacatttttaccagaaacttcttctcggatagtttcgctaagtccatgaacaccgaatttagaagcaacataagccgcatggttaacgaaggtcttcttaccagctagggatgacatattaatgatggttccatgttcacgctctaacatgctgggtaaaacaatttgggttccatttaaaacgcccataacattagtatccaacatggtttgccactcggttgggctttgggtagtcacgttgcctaatagcatcactccagcgttgttaacgagtaagtcaactggtccaaatttagcttcagcatgttcaatagctgttttaaattgagcttgatctgttacatcgacgctttcaatcatgacgttttcaaagttaagcggtaaagcttgaatcttttcaactcggcgacctagtaataattcagggtaacccgcctgattaaaaattttggctatttctgctccaaaaccagagctagcaccagtaataacaattaatggtttattcatattatgtacctacctttgttttatgatatatttgatgttactacttggagttaactccaagtcaaggaaaaattttaaaaatgaaaacatatttaattggcgatattgctaaaaaaatgaatgtaacaaccgatactttacgttattacgataaagaagggctattaccttttgctaaaagaaatgaagcgggtaggcgaattttcacggaagatgatttaggatacgtggaagtgattaactgcctgaaaaaatcggcggtgcctgttaaagaaattggtcaattcatcgagtggtgtatgcaaggagatcaaaccttagaacaacgctatgactttatggttaaacgagaagcggccttggaacgccaaattaaagaattagaaacgcagctcgcgttcttaagatggaagaagtggtattacgcccgggctaaagccgctaaaacggaatcagttaattttaaaccaggtactcagagatcagatccagccttatatgaccattatcaaaaactccatcctgcttcaaataaatttatcgagtaaaagtgcaatttgaaatttacaaaactgaatttatatgctaatctaacgagaagtagatataattatcaaccgtaagaagaacgagtatttaaagcccataacttaaagcgaattgaggatagtgcgagctcaaaaagttattcttttaagaaaaacatcttctttgtttctaagctgaaattacagtaggcttagacggggccggcccgttatagcttggaaagcatttcgatgcttattttaagatgtttaatttaattaaacgaattttgggtggtaccgcgaaagtccttcgtcccttctggggaggaggactttttttatttgtaccggactttttacgaggataagaatggaggatttattcatggaaaacacattagttaaaacactctactctcaagcagaacatgatgctgacgtagaagtggaagtaactggctggttaaaaaccatccgttcttcaaagaaaatcagctttttagaaattaacgatggttcttacatcaagaatgttcaggttatcatggacaacaatgcccttgaaaactctgaagaaattcgtaaggcagcaatctattctacaatcaaagttgtgggtaaagtggctgatacacctaaggctaagcaaccatttgaaattcaagctagttcaatcacaattttaggtagctcaaacagtgactacccattgcaaaagaaggaacatactcctgaattcttgcgggaacaagctcatttacgtcctcggacaaacactttctatgctgttttccggattcgttcattggtttcttttgctgttcatcaattcttacaaagcaacaactttgtttacgttaacacaccgatcatcaccagcagtgatactgaaggtgccggtgaaatgttcaaggtaacaacgctagatttgaacaacttacctaagaacgaagctggggaagtagattcaagcaaggacttcttcaaacaacctaccaacttaactgttagtggacaattgaatgcagaagcttttgctttggcttttagaaatgtttatacattcggcccagcctttagagctgaaaactcacatactacgcgtcatgcttcagaattctggatgattgaaccagaaatggcctttgctaaccttcaagatattatgaatacttctgaagatttgttgaagtacgtggttaactatcttttggaaaatgctaaggaagaattggaattcttgaacggtgccgttgatccagaattaaaagctcgtttggaagctactaaggatgctgactttgcccgagtctcatacacagaagccatcgacatcttaatgaatgctgatcaagaatttgaaaaccaagtcgaatggggcattgatttacaaactgaacacgaaagatacttaagtgaaaaggtatatcaaaaacccgtcttcatcacggattatcctaaggacattaaggccttctacatgcgtgaaaatgaagaccacaagactgtagctgcagttgatcttttggttcctggtatcggtgaattaatcggtggtagtcaacgtgaagaacgtctcgacaagatcaacgaaaagattgccgaattccatctcgatcctaaggaatacgaatggtacgctgaactaagaaaatacggtgaaactgaacattctggtttcggaattggattcgaaagattacttatgtacgtaactggaatcgaaaacatccgcgatgtaatcccattccctcgtacaccaggaaatgctagtttctaatttaatcgttaaaatgaaaagcacccaatcatagattggatgcttttttatttaaccatcttataatttaaaaaataagtgttgcgtagcaatgcacgattagtgcgaataatatgatagcccattttctcgaaaaaagggactgctgtaatagaggcataagtagaatattcagaggatgtaatggtttgctctaatttgtttactaggctagtagcgattcgttgacgttgatatttaggatgaacaaaaagatggtctaagtacccagatgtactcatatctgcaaatccaataacgccagaagaattaatggctactagagcgatattatttaaagtaggttttttccacttttgtttatcaatgttactccatacttcaatttgtttttgattataatctttttgattagtttcacgaatagacttagaaatcatcattaaagttgaatcttcgtcagtgatttgatatttcctaatatgcattttattatcctatcttttggtatgttaaataatatgattttttcgatatgtacgtggtgagcatcctaaatgggtggtgaaaaccttacttagataaaatggatctgtaaaaccggtttgttcggaaatttctgctaacgttagatttgtagtgattagtagtttttgaacttttttcaattttatttttgtgtaaaaacagacgggagtttcacctattatttttttgaaaatccttgaaaaataagcggtacttgtattggtaaattgggctatttcactaattgaaagagaagaattgtgttccataagttcaattgcagagttaataatgttatttctagataatgcttgttttggttctataggtttgaatttttttatttttaaaagcatgaagaaatcttctacgatatgattttggatataatgtgaatctgtgtttaaactgaaatttgttttacgtagaaattcacagttttcataaaagcgatgtgatcctaagtggtgtttacctataaaagtcggtgtgactggatcggggattactctaatgaaatggaaacacatcggttcaagcatattacgtttgaatttgacataaggcggaattaataaaatatcattggcagaagcgattccagaatattgagaaaattcaaattcacaggaaccgctttcgataatatacatcacataattggagtcgatatcagattctagttgaaaactaggtttgttttcccagtatgtatatccttgtgttagagtggccaaaagtatcacctctttttggtcaaaataatacatgttttgggcttaaaagtaaatggagtggagaattcctttgtagtactgttaagacaaaaggagggataacaaaatggtgacaatgttaaagaggaaggttaattctgatataactgttattgggggaggactggctggaatttgtggagctattgcagcagctcgtcttggacaaaaagttagtttagtccagaatcgtggagtactgggaggtaattctagtagtgaggtacgtgtttgggtagctggtgctactaaacatggtgtgaatcgttatgctcgagagacggggataatgggagagttatttgttgaaaaccagtatcgtaatcctgaaggaaatccttatttatgggatgtacttttgatggaaaaggttaaagcagaaccaaatattcaactatttttaaacactgaagtgacctcgatagtaatgaatcaagataaaacaattaaaagcgttactggttttatgtcagcatcagaaactttactagaatttgaaagcggttacttcattgactgtacgggcgatggtttaatcgggttcttagcgggagctgaatttaatataggacgtgagagcagtaatgtttacaacgagagtttagctccattcgaggcagatgaggatacgcttgggagttccttatttttctacacgcgcgacgtgggacacccagtgaaatatatcaagcccagttttgctaaagacatcacagaaacatcaattgtaaataaccgaattattcgaaaagaggataacggatgtgcctattggtggattgaatggggcggagaattagatattgtacatgataacgaaaaaatacgagacgagctacaatcagtagtttatggtatttgggattacattaaaaattctggaaaatatgatgcagacaatctaaccctggattggattggttcagttcctggtaaacgtgaatatcgtcgttttaagggcggatatgtattaaagcaacaggatattgaagaacaaacattatttgatgatcgaattggatttgggggatggtcaatcgatttacatccagcaagtgggatgtacaacgattctgttggtgcaaagcattctgttgcagatggtgtatatcatattccttatcgtattttatattcgcgggatattaataatttgttctttgctggacgggatgtttcagtatcacacgtggcttttggaacagtacgggtaatggctacttgcgcagtaatgggacaagctgcgggtacggcagctgctttggcaaatgaaaagcaaattaagccagccgcaatttattctaattatttgcaggaatatcagcaaaccttattgagagaggatggttctgttttaggagttaaaaatgaagatttaaatgatttggcaagaaaggctgaagtgactgcatctagcgcgttaaaagaaattaatacatatgcggtagatatggatccgtatccacttgataaagcggttgccttcacattgcctgtagatcctaatattaaagaacttaaactccttatttcaacggccaaagcaacagaattaaaagttacttggtatagcacaggaaaaccacagaattatatcccagattctaaaattgatgagcagacaattgaagttgaagcaaactttatgggatggaaaacaattaatattgattggcaaccagaacaaccacaaaatatttttgtgatagtagaaaaaaatgaaaattgttctgtatatctggggcatcaagaatttgccggtgttttaagctatgtaaatgatccaattcaagaattgagtcagccagaattacatgactattcacgtaaaagtcctttgttgtattggactaatcaatcgattaatcgtcggaactttgtttttaaagtagaacaaacggaagcatattcagcagaaaaaattattaatgggtatgtgagaccatatggtggccctaatatgtgggtgactaatttcagaaataaaccagaagaaattcaacttacttggacgaatccgcaacatataaagcaaattaatttaacttttaatgatgacgttaatgaagacattattaaccttcatcatcacaaaacttactttgaacaggttcctgagttaattaaatcttatcgagtgtactatcaaagtgaggatgagtggcatttattatggcaaacagattctaatcgagaaagacatattgtccaaaaattagatcaaacgattgagactaaaaaattaaaatttgaattattacaaaccaatggtagtcaacaaatttcattaaatgagattcgagtttattaaggaggtttactatggaaagtagtcataaaaaactatctaccaatatgcgctatgttattttagcgttagtattcattaatatcgtaattaattatatggacagaaccaatgtttcaattgcaatgccggaactttctaaagaaattcatttatcaacggttcaacaggggctaatcttttcagcatttggttggatttatgctgcaatgcaaattccaggtggtattctattagataaatttggttctagaattatgtatttcatcagtctatttggttggtccttagttactgtttttcaagcctttattggtggctttggacaattaatgggactgagattaggagtaggcttctttgaagctcctgttatgcctgctaataatcgagcaatttcttattggtttccagaagatgaacgaggttctgcgatcggtatttattcatcggcccaattcctaggactggctttttctacaccaattttatattcaattcataatacaatcggttggcgagggctgtttattgtcacaggaatcattggaataatttggtcagttgtttggtatattttatatgctgatcccaataagagtcggtttgttggtgatgacgaattagcatacattaaagcgggcgacgcgatttccgaaggtgatgatgcacagtcaaactctaatacaaagcaagaaaaaacaaaaataacatgggaaaatattaagcaattatttacacggcgtttattaggaatttatattggccaatttgccatctctggaacattctggtttttcctaacttggttcccaacatatttaactaaggctaaacacgttaacttcttgcaatcaggtatgttatcgtccattccttatttggcagcgttctgtggagttatcttagctggttttatgtctgataaattattgaagagtggtaagtcagcaagtttcgcacggaaagcacctgtaattactggattactattaaccttattaattttaggtgctaactatgtaagtagtcccgcactaataattatgtttatgtctatagcattttttggaaacggtttagcgacgatcacttgggtgtttgttacagcattagctcctaaacatttaattggtttagccggaggaatttttaagggttgtggagcattatcttcgatagtgataccaattgtgattggtttccttgtatcaaaaggtaatttctcatctgcgttaatttttattgctgctatcgcattagtaggagctttatcatatattttagtagtaggaaaaattgaaattaatgaagattaggttaacagattatgaattgaatttttatataagtttgctagatattattataaccaacaaccaaaaaacacattctgcatattttcagaatgtgtttttgttttatttaatccttctaccaatgaaacgccacctgcacccccataattaacatccgcactccaattgttgccagaatcaatcccatcaacttcgtaatcacgttcataatgttattacccaatttagccataatttgttccccgtagataaaaatgaaataagtaatgaccgatagaacgacaaaagcactaatcacgatgaaggggttggtactactcgacaagttcatagtagtggcgatggttccaggaccagccagcaccggcatagccagtggagaaatcgctacgtcagtattattactgttaatggaatccttaaccgattgcttgggatcatgctgaataggggacacgttcccttggatcatgtgataaccaatcaaacctagaatgattccacccataatccgtaaagctgaaagattaataccaaagatactaaaaatgtaattacctagtagtgcaaaaagtgccacaatcacggtcgcaacgatgaaggctaagcgcgcaatggcattgacttcttttctactattatcagcagtcaaactcacaaacatgggtaagttagcaaaagggttcataattgcgaaaaaggcggtaaatgatagcaagaaagcttgaactaaattcatagtgcacctccgttaattaagttgaattagcttaacttaattatatgggggaacgatttaaaacccaattaatatggctggttaagaagggaaaagcggtctttaaagacgaatttccaaaaatactcgatttttataaaaagagcttgtatttaactaaacgtgtataatataatgcttgtgaagatagatagcattagccatcacttatctatatttatgcgtttttatacatactgaatgctgggactcagtatgtcaatatccctaaaggcgcccttaattacgaattatagtattaatccaaaatagaggaggctaaaaagtttacataaaaataagacttttatatattatgaaaatgtttacaacgtataaataagagtcattagtaacattggaattattgatgattagattagttgtagtatcggggaagcagattaaaaaaggggtattaataaaatgaagaaaattattttaagtgcaatgttatgtggtggtatgttattaggtgttgccaacagtggcgtggctcatgcagctgataagctaaccgggaatacaaccgcaactgctacagttactaaaggtgatgtcacgttagacattgattctgcaatcaattttgatccacaacctttaagtggggatgtaaactttggttctcaagatgttaactataaagttacagattattctggagatactaaaggataccaactatctgctaaattaggtgacacagatgcaactcgtacggtaaaaattggtgacacgacactttctgatgctgcagccgtagtagcatctaaagattctaatatcgtcggggaaaacgctgataaattatctgtaagccttgaatataatggaataaaagaagtaaaggattatagcactgctattcaatggaatttaactaagactcaaacagaacaaattacagaatagcaccattattccgaggagagacttagttctctcttctttttttgaaaagagatcgatatgaaaaaaatattcacgttggtatttatatttgtaatcagcattctaactgcgacgaatgtacatgctgatcataaacttgctagttattcagtgacacccattttttcggaacatcagacggatggagccgatagctattttgacatcaaatggccaccagctagtaaggaatcatttggtattaaaattacaaataatactaaaaagaccaagcaatttgaaattgaagtgaacaaagctcggactaatcgtaacggcattgttgactattctgatcatactccggaaaaagctaatacggtttacaaattaactcaaatgattaggttacctaaagaagtcgaagttgctcccaatagtagccaaattattcacggcagcattagttttccagctaaagatttcaatggaattttgatggctgaattacattttacggaaaaaacgacagcagtaaagaaaaatacagtttctaacacgattgcttataacattccgttcgtaatccgcggaaatcatgaccaacggcccacaccacgtttatccctgaaccaattgaagatgactaaacctaacttgagtacttacgaattagatgcaaagcttaccaaccatcatcaaaatttacttaagagtgtcaaaacagtttcgaccatcaaaaatatggataacaaaaccctcaaaaaggaaactaagcggattgacattacgcctgaaacaacttttgagaatcctatccaagtacctaaaaatataaaagcaggtcaatacaagcttgttttgaccatgcaacatggaaaagatcattggaaatttgaaaagaacttcaagattaagccagctgatttgaaggtcgctaagcgccatcagattcaaaatcattcggccttattcatcggactggcggtaattgcgctcatcgtaattggcattggctggattatattcaagaagctaaaacgaaaatagttttttaacccaaaagaaggctcgccgttaagcgaaccttctttttatttgtcgtctttatgcattttatctttgagttcttccatggcgccttcagctgattccttgacgtctttaagcttatctttgactttaccagtcatattttgagctttacctttagtttcttcttttttgtcgccagttactttgccggcaccttcacgaactttacctgtaactctatctttagtattttccaatctttcgttatcagacataaaacaatacctcctaaaagttaagttttttggttcatctccattgtagcaagtccaccatctaaagtagtaatgatatgctcaacttgagtcgatggacaaaaagttgtatcatgaaaccgaatttaaaatttaataaatatctgcactaggggtgttcttagaagaactgagatacgcttgttcagcgtgatccctttgaacctgtaagttagtacttgcgaaggaaagtgtttaattgttgaaaccaaaaccatccttctgtctataaaagggtggttttttcgacattaagggcagtgatagatattggtaaggagcttattatgaaccttcaagatattgccaaaatccgggaagttaatccggtagtagttaattatgctaattttgttaccccatttttggtggcgaatggcttaaatgcggtgggagcttctcccatcatgagtgatgaagtcagtgaagcggaggaacttgtccaactcgcatcggccgtggtggttaatgcgggcgcttctcgtaaagagagctggccactgatgagtaagctgtgtgaagcagctaatcaatatcaaaaaccactcgtcttagatcccgtcgcagtcggtgccacccagtaccgcaaagccctcaatttgatgttactagaaaaatatcatttcgatgtgattcgtggaaatatcggagaaatcgccgttttagctggtatcgattggcaaacgcgcggcatcgacgctggaagtgggaccgaagacatgagcgcagttgtccaagcttgtgcccagaaatttaacaacgtggtgattgctagtggtgaagttgattatatcagcgacggtcaacaagtgattacggtgcacaataacactaagttgttaccagccatcgtgggctccggcgatttattatccagtatcgtaggagcgttcagcgccgtagctgaaaatactttagatgctgctgttaccgctagtttggtactctcttgtgcgggagaacgcgcagcggcgcaactcgatcaacaaaatcgaccaggtagttttttgtcctatcttttagacgaattagctaatatcacccctaaacaagttcaagaccttatgaaaattggagaagcataaatcatgaaaagtaaattagtacctcaagttttaaccatcgccggcaccgatagtggtgggggcgccggcattcaagccgatatgaagacgatgcaggagcgtcacgttttttcgacctgtgtggtggtggccgttaccgctcaaaacacgttaggcgtgctagatgtagaagttatgcccaaacgaatgattgaccaacaatttaaagccttggcggaagatctagatatcaaggtagccaagactggcatgcttgctaacaccgcggtggtgaacgccgtggtggaaaactatcaaaaatacgactttggaccactcgtcgtcgatcccgtcatgattgctaaagggggcgcaaagctcctgagtgatgatgcgattgatgccgtgcgtacccaactcgcaccgcttgcttacttaatcacccccaacttaccggaagcagaaaaattagctgggatggaaatcaaaaataatgccgatgtgaaagaggccgctcgtcgcctgcaacaactcggggttaaaaatgtcttaattaagggcggtcattttagtgatcaacctgaaagtcgagattacgtcctatttgaaaatggcgaagaaatggaattgacgggaccccgttttgaaacgaataacacccatggcacaggcgacacgatttcttccgtgattgttgccgaactagctaagggagcatctttgaaagcagccttgcgcaccggtaaagcatttatcaatgcggcgattagtgatggtattcaagttgggcatggacatggtcccttgaaccattgggcttatggcgaggaagaacaatgaaattcaattcagatatgttaaaaatttattttgtggccggcacccaagatgttgctaataaggcggacttcttacctaaagtggaagaaatcttacaagctggagcaacggcctttcaactacgggaaaagggttataacagtatcgataatccagctgaattaaccgaactggctgaaaaatgccatcagttaacccaaaagtatcacgtaccgttgttcattgatgatgacgtggacttagctttagccattcatgctgaaggcattcacgtgggtcaaaaagatgaaaaaattgagtcagttttaaaacgggttcagggttcgatgattgtcgggttatcttgtaacaccgaagcgcaagtcaaacaggctaaccaactcgatggaattgattatctgggaaccgggacggtctttgaaacgatttctaaagccgacgcgggtgctgcactcggtgtagccaaactccaagaacttgtcgaactgagtcgttatccaatcgtcgccatcgggggtatcaccctcgacaatcttccccagacgatggccacgggagtcaaaggctttgcggccattagtatgtttacgcagatgacggcggtgtccacccaaatgcaaaaaattaaagcgatcgttaagggatgaggaggaaagttatgttttcagcacggttaaaagcaattgctcaacccgtcctcgccgacattgaaaatcatccattcgtgcgaggaattcaagcgggcgccgttccggcagcggccttaatggtctacgttgaacaggatacctgttttttagatgccttcgccaaagtctatgcgggcgccctttccaaatgtactactaaagatcagatgcgcttttttgaggaacagattcgctacactttaaatgacgaagctggtgcacatcaaattctatgtgacatcgctggtcaaaaactcagcgaccatcaacatgccgaacagcgaccaattacctacctatataatgagcatctttttaacgctttacgaacgggagatttaatcgacttaattgcggcaatgttaccttgtccttggacgtatactgaaattagtcagcaaatcgtgaacggagcagcaccagataatcccttcttaccctggattgaattttatcaacctcaaccaggtcaaattgatgacagcatggtaaaaactttatttggtatggttgacgaattagcaataggtctcagtgaggaacgccaacatgaaatcgaacaacgtttcttgcgaagttgcgaattagagtatgaattttgggaacaagcatactatcaaaaagattggaaatataaaaattaggccaagcgtgttagtataaaagtaaataggtgacgaatttaagaggaggtgacttaattgtcagactccttttattatttacccgtcattaacaacccagagagaagaagaggaattacatgaatccacaggcagttttgaaatcaaattttggatatgatgcgtttcgaccagggcaggagcaagccatcaacgcagttttggaccaccaaaacgttttggccgtcatgccaacgggcggaggaaaatcactgtgttatcaaattccagccttgatgcaggcgggactaaccttagttatttcgcctttgatttctttgatgaaagatcaagttgatgccttagcagccaatggaattgacgccaccttcatcaatagctccttagattatgcggaaatcaacgagcggtttagtcaagcgcgccagggtgcggtgaagctgctttatatttcaccagaacgcctcgattccgaatactttgatcgtttagcagaattaccgattgatttaattgccatcgatgaagcccactgtatttcacagtgggggcatgattttcgaccgagctacctaaaattaacggatatcatccatcatcttccaactcgaccaacgattatcgctctcaccgctacggcaacaccccgagtagctgaggatattaagcaacgcttagccatccaacaggaagttcaaactggctttgctcgacctaacctttcatttaaagtcgtcaaggatcaagacagtgaccgttttttgatcgactacttaaaattgaatccagatcaatcgggcattatctacgccagcacggtgaaagaggtcgaacgtctccatcgccttttaactaaaaagcatttccaagtggccatgtatcatggacaactttcgaaagaagaacgtcggcaaaatcaagacgactttctgtatgatcgagtgctagttatgattgcaaccaacgcgtttgggatggggattgataagagtaacgtgcgctttgtcatccacgaccagattccgggcagtatcgaatcctactatcaagaagcggggcgtgcagggcgagacggtctaccgagtgaagccatcttgttatacaaattgcgcgacgttcagattcagcactactatatcgaacaatccgaacgagacgaagccagcatgacgatggaataccaaaagctacaggcgatgagtcagtatggtaatacgcaaaagtgtttacagcgctacattctaaattacttcaatgaggatgctccagactgcgggcaatgtagtaactgtttggatacacgagctctacaagatgtgacgattgaggctcagcaagtgttgtcttgtatccggcggatgggggaacgatttggaaaagaaatggtcgccctcgtactgacgggttcgaaaaatcagcgggtaaaacagctgcactacgaaaagttgtcgacatacggtttaatgcagcagcggaccaagaagagcgtgaccgaattaatcgattttctcacagcggctggatacatcgccccagacggcggccagttccccgtcttgaaaatcaccgaggagggcttacgcgtccttttaggtcaacaaaaagtggctcggaaagtggcagttaaggcaaataagtctttaccagaaaacgatgcattgtttgaagaattgcgggcgctccgtcgggaactagctgaaaagcaaaacgttccaccgtttgtcatcttttctgatcaaactttgcacgatatgtgtacagttatgccagacacgctcgatgaaatgttagacgtaaaaggaatcggggaaagcaaactccaaaaatatggcgaacagttcttccaaattttacgaaattatcaagaagcttagtatttgttaaagtgctgagctttttttgttagaatttataaggataggtataaaatgttgctactgccaatgagtgaggagaatgctacttgcgaatcagaacactgctaacctggttgttgcttttcttgggagcaacgtgggtcattaaaaataacatagtccagataccagataatgtgcaacagacatttcgaaacggagttagtcgggtgacgactaacttaaattcgattttggattcaaactggaattttaatcagaacaagacgtcgaccaaaaaggatgtcagcgacgacgcaaccccggtggaatcgattgtcaaaaacaaaaatttatcgaataaatactactacagttatcaagcgggaactcctgatgctgtccagaacgtttttaagcgtgccattgcgacttacaatgccacggggattgttaaaattgttccaggagcggaacaaggctggctaaatcatttagagctgggaacctatcgtaaaaatgtaccgctaaaccaatcccgcacgattgagctagggattggtgggccaaaaattatggaacaaacgggcgtagttagtcgaatcgccaaccatgcgtccgccaaactcaacatttactacaacaaagccgtttcacaagccgtcgccacccatgaagtcgggcatgccttgggcttagaccacagccaagctgaggattcggtcatgtacccgttggatcgcgagcaaacggctttatcgccagccgaccttgcagggttaaaatcaatttatggagaaactaagtaagagctactaatgcaaattaggagctcttttattttgttacaaaacattacggcaatattacaatatggagtaaatgcccgataaaaaagcccgttttcgggttaagacgttgaaaatttatagattaaatgatagatttaattgtgacttattaaaaatggagagatactgtatgaaaaaaacactaacgtggttaggagtggcggttggttcgttagccgtttttgctggtgcagggttcggtgtaaccttggtcaataaggactcacttgctacacatatgattgcaaagtacacgggaaaaagtaatacttcctcaagtagttctagtaccacatcttcttcagtagaagactcagcaactttaaaagttgctaagagttccaatttagattcgattttaaataatggtgaatataacggttcagcagccttagcgacgggtaagaagattcttactagctcacgaggctatgctaaccatgctgctaaaaatgaaatgacggcggatagtcaatttttagtaggaaaaatccaagatacgattaatgctgggattatcatgcatttaatcgatacaggcaaagttaagctcaccgataagctttcaaaatatgacagcgaagttgctggagcggaatccgtgaaagtcgccgatgtgatgaatcaggcttcagggattacggcggataccatcgctagtagtggtaagactaagagtttagtcaaagaaatcaacgaaaatgcgtcctatgattcgacgatgcaaggggtattcgtggactccagagccaataccatcttacaagcggccatcatcgaaaaagcttccggcgaatcttaccgttcggttgtcagtaatttgattgatcagttagagctagctaataccgcttggggaatgaaagcgaagactgtcgattactaccgggtggatgatgtaggttcagcatcgaaggtaagcaactcaactttagatacagcggaacttaaccgcttgggtagcgatcaattggtgagctcgccagccgatatcgctcagctgtataactacctatttaatagtgattatgtttcaagttcgactttagataaagtcttcgatcagactaacggtcatgtggctggttttgcggttaatggggatgccttaagccttacccaagccgtgggtggcggacgaaaccgtatcgaatggaatcttaagaaacagaccggaacgttcctatttagtaattacatcaatggggaaaataacttgtcatcaatttcgaaaaatatgtttgattacctaaaataaaccttggaggaactcatggaatcagtagaatcacaacaaattagtatcggccagattttgtcgatactacgtaaacacattggattaatttttgctagtacgtttatcgtaactttgttagccgcctttatgactttttttgttatgacaccaaagtacagtgccacgactcaaattttggttaaccgtaaattgtcagagaatatggcgggagcccaattgcaacaaacacaggccgatgttcaaatgattagtacatataaagatatcattactagccccacggttttgaagacggttaacactaaattacaaggtcagcctggctatgaaaagggtgatgttgatagtttaaagagttctctttcagtcaatagtcaacaaaactctcaagttttctccatcaccgctaagagtaccaatcctaatacagcagctaagatggcgaacgaaacagcgacaacttttaaggacaaagtagctaagattatgagtatcaataatgtttcgatcgtttcgaaagcgactgcggatgaccaaccggttagtccacgaactaagttgaatattgcagctggtttggtagttggtttactcttaggaatcggattagccttcttacgtgaatttagtgatcgaaccgttacctctgaagaattcctaaccgatgaattaggccttaaaggtttgggaattattagtgaaatcaatgaaagtgatattcgtcgtaaaatcacaccaaaacttagagcaccaatgagtgatgatgacgatcaatctagaatgcggagaagggtataggtaatcgaaatgtttaagaagaaacaaaagctagataacgaaagtcttaaaaatggtgtgggattagttacttttactgatccgacttccacgattgcagaacaatttagaaccgtacggaccaacattcaattttcatcagtcgataaggctttgaaatcaatcgtctttacttcatccgcatcatcagaaggaaagtcgacggtaagtaacaacgtggcggtcacttgggcggatcaaggtaagcgcgttttaattgtcgatgccgatatgcgtcgtcctaccgtgcatcgtacctttagtgtcagcaatgcggttggattaagtaacctcctggcggagactggcagtttggaaaacgccatccatgaaacaattattaataatctatcggtaatgccaagtggcccaatcccacctaatccatcggaactattaggttcggccaagatggccaccttattggatcaactaaccgaccattatgaccttgtgattattgatgcgccacccgttaatacagtaaccgacgctcaagtcttagcagcgcgtgcggatggaacaattttggttgtccctcaaggaattgccgataaagccggggtgcgtcatgctaagcaattacttgaagcagttcaagctaatattctaggagcaatcttaaaccgagcaaccgctgaaaaatcaacaggttattatggtggttactatggtggttattacgggacggatgataaataatgatgaatttaattgatttacattgccatatactgccaggtgtcgacgacggtgccaaagatttaccaatggcactcgacatggcccgtgaagcagttaaacaaaacattacgcatattttattaactccgcatcacatggatggcatgtatacgaaccacaaagcagacgtgattcgtaaaacagcggctttccaacaagaactagatgcggccggaattcctttgacggtttttccagggcaagaagtccatttgacgggagaactgttagatgcaatcgataatgacgatattttgtttatggatgaggggagcaagtatttgttattagaattacctcacagtggaattcctgaatatacggaaacggtaatttttgaattgctagcccgagggattacaccggtgattgctcatccggagcgaaatcatggttttcaaaaaaatcctgaccgattgtacgactttgtagagatgggatgcttaactcaactaactagtagttatctgggggtattcggagaaaagatagaacaattgacgcaaaaaattattgatgcgcacctaggctttgttttttcatccgatgcgcacaattttgaaggacggcgttttctaatgcaagacgcttttaataaattaattaaagaaacgacagatcgaaaagctgggctgtttaactataatgctaagtcaattgtaaatggggattcaattagtactaatagcattctgcacttgtcttcactaaagacaaagaaaaagaaaaagttttggctattttaaaaattggaggaagtttatcttgaagaaagcattaattacaggtggagcgggttttataggttctaatttggcagataagttagtggaagatggatatgatgttacaattgtcgatgatttatccatgggactaataagcaatattccagattcaaaagatattcatttttatgaaaaatctattacagattacacttttatggagaaaattttaatagagaacaattttgactatatttacttattagctgctatagctagcgttgctgacactatagaaagaccgtattcttctcacctagttaatcaagaagcaaatataagaatattagaagttatcagaaaaaataacttgaaacctaagagggtcattttttcttcatctgctgcagtatatggaaatgaacctacgttacctaaaaaagaaacttcatcaatatctccagaatcaccgtgtgctatcgataaatttgcaaccgaaagatttgtcataaattacggtaaattatatgggataaatactgctgcgacgagattttttaatgtgtatggacctaagcaaaatccacattctccatattcaggagttatttcaatcattagtaagagcttaaaatcgaaagagacctttacaatatttggagatggtgagcagactagggattttgtttatattgatgacgtagttaatgctttaattattttgtctaataacgatgatgctatacataatgtatataatgttgcaacagggcactctgttacgttaaatgaaatgataaatgtttttgaaaaaatatctggtaatcatttgaatttaaagaaggataaagaacgcgtaggagatattaaattttcaaaagctgacgttaccgcacttataggattggggtattcttctaattttgatataaatgatggattaaaaaaatactgggaatcattataaatacgggagagaaaaaatggcaagcaatattttaaacgatttggaagaaaaagttattgatatagttaatagtaatgttgaaccttacgaaggtaacaactatctatatgtaaaaagagcgttggacattatattttcgctgattttacttattattgcaattccatttatcattgtttttgcgattgcaatacgtatagaaacacccggaaatcctttttattcgcaagaaagggttggaactatgggtaaaccaataaagattactaagttaagatcgatgtatagcggcattgaaaagaagtctggagcaatgtgggctcaaaaaaacgatgctagaataacaaaagtcggaaaaattatacgaaaaacgagaattgatgaattaccacagttgctttcggttttaaagggcgatatgagtctaataggacctagaccagaaagacctaattttgtcattcaatttagtgaagaagtccctgggtttgagcaacgtctaagaattaaaccaggtttaagtggatgggcacaggttaatggaggttatgaagattctcctgcaggtaaactaaaaaatgatttatattatataagtcacttaagttttaaaacagattttatggtttttttgaaaactataggtgttgtctttactggtgaaggagcaagatagaatggaatcgagcaaaaattctttagatagctatagcggattgatgtccgtgtatactagagaaaaggctgacagatttgagaaagcaattgaatctatatttgcacaaactgttttacccagtgaatttattttagtcgaagatggaccgttgaatagtgaactaattagcattatagaaaatatagaaaaagaattctcagccagaaaaattaattttattaaagtttgtaataaagttaatcggggattaggctattccctgaataaaggcttaaattatgcgaattatgatttagttgcaagatttgacagcgatgatattaatagagctgatagactagaattaactttaaaggaattcaaaaaagatactcaattggcgatggtaggcggaaatataagagaatttgatcctaaagatgatgccttttcaaaaatacgtaaggttccacaagagtttgaaaatataagaaaaaatatcgcaaaaacaaatccttttaatcatatgacagtaacttttagaaaaaaggacattcagaatgtaggtagctatgaagatgtcccgtattttgaggattactacttgtggtttaagttgatagaatcaaaacgaagggttataaatatagacaaagttttggtagatgtttgtgtagataacgactttatttttagaagaagtggtttccaatatttaaagaaagaaatattctttcaaaatttattgtattctcacaaatacataaacttagcacagtatatgagaaatatcctattaagaggaggaagcagattgcttcctaaagtactaatcaagttaatttattcaactataagagaatagtaaagttattggagatattatggataagcattttaaaatagactttgttattacatgggttgatcagaatgatagttcttggagagaaaagataggtaaatataaagatggaataagcaactctgcgcgcttcagagactatggaactttaaaatatttactacgctctattgacaagtttgctccatgggttaataaagtatatttggttacagataaccaaattccaaaatggataaatttagaatttgaaaaattaaaaatagttgaccatcgagatataatcccagaagagttactgcctacatttaattctaatgtgattgatttaaatttagtcaatataaagggattgtcagagcattttgtttattttaatgatgatatgtatttaaataatcctgtaactccaaatgattttttcgatgattatggaaaaccaatggacacgtttggatttaacgtaataatgccaactgaaaaatttgatcacacctttgttaataatatagctattattaacaaagattttaataaaaaagaaattatcagaaaaaacttttttaagctattcaatattaaaaataggatatataattttacatcagcattattagctcctttcccaagattcacaaggtttatagatccccatgtacctatttcttttagaaaaagtacaattaaaaaagttaatgaaaaacatgaagaaattttaagatacacaaagcatcgatttagggatatagaagattactctatttggatatataggtattacgaattagtggaaggaaatttttctgttagaaatagtaattttgtaagaggaattcaattaagcgatcttgaacagaagggaatcaatataatacgtggtaaagtaaaaataatcaatattaatgataaagatgatataagtatggataatttcgaaaagttgaccaacaagcttaaattagagtttaaaagaaaatttagtcaaaaaagtaattttgaaaagtaggagaaaaaatgtctagagaattatttactcgaaaagaagatagtaataaattgtttatgaatttatttaccttaaatattttttatcaaatactttcgaatagcttgcttagagaaatttatagtagagcacttttttcttatgtaggatacggattaatagtaattcttttcttcgttggtatattaaatggattgatacatttgaatagatatagagaaattatcaaatttttcttgctattgacactaatcatagtattatttgtccaaaagaacacttctattctattcttagtggtatttgggtttattgcaagttatctttcaataagtgaagttatggaatgttttttttctggcacaatctgtgctgttcttcttttattaattttatgtgctttatcaatagtaccctatagagatgcttacactggtaatatacaacttggttttagcaatcctaatacaattggattctattttggtcttatcccaatggaaatgtttttcctaagaaaaaataaattttctatactcttaatgagtataatttcttttgtggctaattttttcttgtttcaagattatacaatggttttagtattgtttatatttatatttattctttacctaggtaaagtttttccacggttactttttagtaagactgtgaagttaataacaattttattgccatatattttaacaagtttatccatatatttagcaataaattttacggtcaatccgttgatgtataggataaataatatgctgagtaacagattgtacttctggcaagaatacataatggcttttccccctaagctcggttatcaagtaacaaatatgaatcaggtatatcctctatcatttaatgcgaagtggccttttgatggatcctatatttattatttagttacttctggatatgtgacctatactatttttctcatagtgacaacagtagctatatactactttttcaagaaaaaaaatgttgctctaattgcattaacagttgcttcactggctatcggattttctgagagtttgcttttttcattttatcagtctccgtttggagttcttgccgtagcaattgttttatttaagataccttttgaaaagagggagaatttatagaaaatgaaaaaaatattattgacaggtgttggagctaatatgggtggaacagaaacatttgtccaaacactagtgaaagagttacatcataatgccaattttgtagttctagctgcttctaaaacggaggttgcagaagcagatttttttaaaaaatataatgtaagagttgtttatttgaaaaacattttcggatttaagagcattttaaaaagacccagaattattgagtcttttttattaaaagaaaagtttgatattgtgcatataaatgctactagcctaaatgctgcatacatagcaaaaaaagcggataaattaggtgtaaaggttatttaccaagtccataattattcgccatcgggttatggggttgttgcaaaaagcttaacaactttattagctaagaataatagatcaattttaaaaaaataccggatataaagctagttgctgttagtgaagaagtacaagaaaaattatttggcaagaaaattaaaagtgaagttattcttaatggggtagatagtgacgtatatgccttcaatgaaagtagacggcgcataataagagaaaaatttttgatttcagaaaaagaagtagtgggaataatggttgcacggatgacgccaataaaaaattatgatagagcagtaaaaatagcgacattatcaattgagcgaggcgtgcttgatagattttatatggtaggcgatggaccagaacgtgaacgtatccagaagttgatcgatgaattgcctagtaggataaaagaaaacatgtacgtcatgggagaaaggaacgatataccggatctattaactatgtctgatgttatgcttttgacatccagtaatgaaggtctatctttgagtgttatagagggacaagctgcggggttaggaatagttgcttccgatggagttcccccagtgactaacattacaggtaaagtaatttacattagtcttagagtagaagataaggtttggacagacgctattgaaaaaatgagtataaacaattttactgatagaataaagagtaatgaatatgtcctaaattcacaattttctaagaagatatttataagaaaatttatagaattatataatttataaatgggattggtacgatgaatggcaactagaactttaaaatctataagaaattctaatacggcttttgtgggacaactggttattttgatagcgcagtttataactcaaactgtatttgtaaaagtgttgggatctgaatatcttggtgccaacggattatttacaaatattctaactttgttatcctttgcagatttgggtataggtggagctatcacgtatgcgttgtataaacctctagcagaaaatgattataatactatatcagcaataatggagctttttaaaaaaatatataatattattgggtgcacaatatttgtattaggtacttttttttctttctttattgaggactttataaacagtaacaccacgattcctcatatacagataatgtttattttatttgttttaaattcggctacgagttacttttatgcatatttaagatcattattgattgcggaccagcaaggttacattgacgtaataaatagagttattttcacaactatacaaacagtattacaaatcagtttcctgttacttttccataaatatgtgttatttttaataattcaaattctatgtactctgtctgctaatatttcattgtatcgtaaaacgttaaaagcatttccttatttatatacggaaaaaagtaaaaacataaaaatttctcctaaaattatagaaaaaatcaataaaaatgtcgttggagctgtggcatctagattgggaattgtagttgcgaatggtacggataacttaattctctcaagtttcattggtttatctattgttgggaaatatactagttatatgcttatctttaacagtgctcaaaatatagtaaatcaagctataaattcggtgatttcgagtatagctaatttttctgttgaaagagaagggaaaggggagagtactcttttctttaattttcaatatgttgtatttggaattgcgtatgtttgttcatcagtaattttggtgatagtatctaatttcattactttatggattggaaaattttacgttctaggtaatattaccacgattttaattatagttgtgtggtttataaatataagtagattaagtgtgcaagcatttattaccgcacatgggctttattgggaaacaaaatggaaatctattattgaagctatcataaatttaattgcaagtttatgtttaataaaattcacatctcttggggtgaattctgtgatacttggaacgcttatatctatagtttttgtgagtttatggtgggaaccaatggtattatttacgtctgtaaagaatatctcgttacttaaatttttatttaaatatttaagcctaatatttattgagagtattacaatcttgtttattttatacatgaaaaataagttcgcttttcttcaaacctcatcaattgtagatattacattgcagactatttgtagtggtattatatttactttgttttatttagcagtaaatattttttctactgagcaaaggaatgttatttcaaaattatgtaaaagtctaaaaaaaagaaaacaacatgttcataaaaattaaaattatatccctctcgttactataaagatgccctataagagaagtaaggaaagttgccttcttatttaaagaagctttgataataaatatatatatacgataattatctggtttgtgtataaagtggtgactatgccagttaaatagtaaaatatttatataatgaggtttaaatccgaaatttaatggctctagatcaataagtgtggaagaagataagtgaagaaaacaattcgtaaatgaattgttttcttttttattttaaagataaatccgatgtatagatgacaaatggtagattgcaaatttaatccgaatttttggacaaatttgtcagcataacctgatacggtatatttattttaaaaaatcgtaaatcactagctaactagctactattcctgtattcacatcccttggaggtgttattttcatcgctcttaagcccaatatattgaaaataaaaaagattgagccaaaattgactcaatcttttttataatattattttactcgagctaagaaatacttcttctttccccgacgtacaattacaaacttaccatcaaagttacttgcagggtcgatttcagcattaacgtctgttactttttctccgttaattcgaatagctccattttgaatgtcttcccgagcttggcgccgtgatgattcaatcttagtggtatcaactaaccaaagtacaatgttttctttcttattttcaacatcaacacttggcatattcttaaagccttgttcaatttcactagcagttaaatcttttacttcacctgagaataaagctgctgaaatatgttgtgcttcttcaaccgctgcatccccgtgcacaaatgaagtaacttcttctgccaaacgacgttgtgcttctcgtttttctggagctgttttaactgtttcagccaaacgttcaatttcttcatgacttaagaatgtaaagtacttcaagaatttaactacatcccgatcatcttggttcaaccagaattggtagaattcataaggagtggtcttttcagcatctagccaaacgttaccaccctcggacttaccaaacttggttccatcagctttcaataacaacggaatagttaaaccataaacctttgcttcttggccttccgttcggtgaattaaatctgtaccagctgtaatattgccccattgatctcctccaccgatttgaagttgaacatcttcattcttatatagatgtaaaaagtcaattgattgtagaatttggtatgtaaattctgtaaatgaaataccaacttccaaacgacttgctacgatatccttagctaacatcgtattaacgttaaataatttaccgtaatcacgtaaaaagtctaacaaggacattttagaaagccaatcataattgttaaccattcggaaattatcggttccaaagaatttcaccatttgagacttcaaggcttcttcattatggtgaacctgttccatggtttgtagaactcgttctgcttttttacctgatggatcaccaatcgatccagtcccaccaccaattaaaataactggtttatgacctgcttgttggaatctcttcaaaaccatgaaaggaattaaatgcccaatatgcatactatcacccgttggatcaataccagcataaagcccaatcttcttttcgtctgttaactttttcaagccttcttcgtctgtttgttggttaaccgcaccacgccaagtaagttcatcaataatattcattttcattcctccaattttatcgaccatcttcaattagaaataaaaacgtccccaatcttaataaattaagatcagggacgaatttttccgcgttaccaccttgattgagtatcaatactccgctcaacatcgataacgagatgatccgttcattaaatgaaagctccatagtgtaattcgtgtcattaataagtctgattcgcatccccaccagatttctgtttgcttgcttaataacctactatgctacttcaaagcttcgttattggttacaattttacggatattcaaaacgactgtcaaccttatttagctaactcataaattgcatgggcgtagataacagcagcgttgataatatcatcaatttccatgtattcattagcttgatgcatgacattttcacggccagggaactgggccccaaaggcaacaccgcgatctaaaattcgaccgtaagttccaccaccaatgaccgtttcttcacccttttcaccagtatgttcttcgtaaactgaaagaagtgttttaaccaatgggtcttcaccggatacataatgtggtacttgggcgtgtccatgaatttccacttttgcttcaaaatccgaaagggcctcagttgccttttcgataatttcatccgcattcgttgattgagggtaacgaacgttaataataacgtgattagtcttaccgaattcgtaattaaataagtccggtgtgaccgttaagtcacccatcttagcatcaatcgaattgattcctaacttatgaccacgtgaatctaaatgcatttgttcggcaatcatcttcaaatagttgctggctactttagtatttaagaaagttgctaaaaaggtagcagcattcaatcctgctttcggttctagcgcatgtgctgattttccaatcaagaaaaatttcaattcatttccatcaacggtaaattctcccgtcaatccattttcagctaaaaatgtatcaaattcagttttgagttcttcaacgtcaacttcatcagcaattacaattgctgttgcatcccgtggaatcatattttctttaataccactagtaaatgatttcaaaactaaatcgccttgtccatctgattgaggaagttcaattttgaaggaagcaatccctttttcaccattaataattgggaattcagcatctggagaaaaaccaaaatcaggagttttttcaacttcaagataacgattcataccaacccattcgctctcttcatcggttccaaagattaaacggatttttttagaaacgggcaacttcaattctttaatgatctgtaatgctaaataagcagccattgaagggcccttatcatcactaattccacgtgcataaattcgtccatttttttctactggttcaaatgggttagtttcccaaccttccccagcgggcacttcgtccatatgaccgagaattccgaaaatttcttcgccatctccgtattcaatatggcctgcaacgttatcgatgttcttcgttacaaatccatcttcctcagcaaaagccaacatcgtttccaaagctttacggggaccaggtccaagtggagcatctttggttgcatgttctgtatcacgtgagctgtcaatcttaagtaattccattaagcgttctaacataacgtctttacgactttgtacttcagcattccaatcaattgtcatctgggataccacctttatttttattcatatacattttttctatacggtagattatacagaaaaaagataaggatgtggagttccaccttttagaaggttaaagatttttcacatacttatcttcatttttgttactttttttgtttaataccagctcggcttatcaccatctgtattgggcttattaacaccgatagaatgcttcaactcggtattattttgaataagttccaccacgatgtgagcgatactcttccgagaaacttcagttcctttgaagacctcgcccttttgggtaacttcgaaatcaacttcgtcgttgttagttaaccaagctggacgaacaattgtatagtccaaatcactgtcctcaatcacatcagcggcagcccgataattggttatgtaactccccaatgttgaattattccattcaccaaacttaccaggtacctcatcgtaaattccaagggtagaaatccagactaatcttttaatctcaaccttatccatcgcttttaccaccgcttgagcctgttgtttaatatcgccaccagctaaattagcgtaaaccgcatcaactccctgcatagctgcgactaattgttctaagttagttgcgtcaccctcaattacgacttctcgatcgggttgaattggatttaaacggccagctttgcgtaaaaatagctttaaactgtcatccgttttttctaaaaattccttttctgccaaacgagcgatttttccatgagcgcctaaaatcaaaactttttttgtcataattatctacctccactattcattctacttgcttacaaaaaattagcaattataaacacttttacgtttaggtaataattttcaatatttttagctacaccttttttaatgaaaagcgacaaaaacttgccaaagggttactactgtacaaattgcaatcacaattaaatcaccaagaatggtttccatttccattactgcaaatttctctacatcttcgcttactttatcaactcgacgacgagttctgatggaaatccagcagaagtaggccacgattaaacaacaaaatggaactaaaaacaaaacatttttattcaccattccagctgaacttcctagagctgctggcacctcattttgtagcattggtgaagcgataaaggcaattagcaatggtaaaaacgcaatccactgaatccatttaaaccgtgataacgcaattccttgtaaccatgttggtaaattatcaatcgtcaatgtgggttttcttgaatctgcaatcactgcttgggctttttctgatttttgcgccgctgttaatttattttttcttttactcatatttaattcccctatctcttctcaatctacatttagcatagcagttccttggataaataaaaaatgcgggaaatgagcttaattaaactcattggccacatttttatttttagtgatcggcttatttgttggccatttgagcacgtttttcagcttcttgctgaagtgcttggcggtcagcaatcttgaagaatggatagtagattgctccaccgattgctaagttaactaattgaataactgcaccggaaatcttaccagttgcaaggtatccagaaatcaaaggtggagttgtccaaggaacagcaacaccaagtggtttaccaacccaaccgaacttcattgcgtagtaagtcgtgataactgaaatcaatggaacaatcacgaatggaatcgcaataaccgggttcaaaacaattgggaaaccaaagataattggttcgttaatattgaataatcctggaacaccagctaatttaccaatagctgataagttttctgatttagccaagaacattaacattaaagcaagtgataatgtttcaccggcaccaccaaagtgaacaaagttatcaaagaattgttgtgtggcgatgtttggaatagccttatgtgctttaacagcatcagcattttcagtcatctttcctaaccaaattggagccatgattccaccaacgatgtttgaaccatggataccaaataaccaaaggaatacaacgaagaattcagcaactagagcaccgaagattgatccaccaacgacgttcaaaggttgagcaacgattactgtaataacatttggaatcgtcttaaagtccgtgaagctaacacctaaacgaagtaaccacatacctaaaataataacaaaacctggaattaatgatgaaaatgcatgtcctacagcaggtggaactgtgtctggcatcttaaattgccaatttttatgaatcatccaaacgaatgcatcagtaatgaataacccgattagaagagcttcaaagagtcccattgaacctaattgtgttagtggtacccatgctgctcctgccttatctatattcaatggaatcgttaacataaatgaagctaaggaaaccatacttgcagaaagagcatcgattccttcatatgatttagctaattcatacgaaataccgattacagctaccattccgatcacactaaatgtagcattagtagcccagccaaccgtagtttgccaatctgcaccaaacaaacttgacatcaagtttagatatgcggggattgggaactgactaataatcatgaatactgatccaataatgatcagtggcattactagcgcaaaaccatcacgcaaagcaaccaagtgacgagatgaagcaacttttccggcaattggcattagcttttcagcaaatgcattagtcttattgttgtcactcataaataaaacctccctaaatttttattgatcagcaattacaatctgaattagtaaataattgatatgaccttaaaattactttcccaaaatattggaatcgctttcacaaatacataataacatttgtacctacaaattaaaaccgttaacacctaatttggaatttgttttttattatacataaaaaagttatggttaaaagctggtagccctattattcaagacattgatatccgactcttgttccataactttcttattttttctatttggtttcgagcatcttgaagtcactccaaggctgtaagctgtctaaaatcatagcatcttctttagcaacatgacctacaacattaactcgaccattattttctaaatcttgcaaagcaatttgtgtttcagctttgtactgggcatactcattattcatcactaacacgtcgccttttttaattggaacaggattgttagcaggcacatcttcatcacgataccaaacgcgggtcattgtgctacgtaaaacgtaatccgaatgatcgccacgatatgagtgttggctttcaaaaacaattttatgttctaactctgtcattgaaggagctggaatcacatgaaaggctggcatactcattttaaatgcttcggaagcggcttttaaatcttcttcagtaacaccagcattagaaattaagacatcatcaatcaatcctagcatcttcaaatgcataatttgtgtgaagagggtttgtccacgatgttcttccagtgaaaccatttcttcttggagtggccaaggaccgatattaccagaaggggcattaacaaaagcggcggtatttaaattatgcttccgatattgttcagaggtttgtttgaaatagtccaaccctaatcctgtatatctttgaggataaaaattatgtgaaccaatcaaattatcccggtttggtgagtaatccatgatttgatcaatatagtgcgttccacgactcatattaacttcgatttttaaatcataaggattatgcgtcattcgagcctcttccatccccgtaaatccttcatccagtcgaatggcccatgccccaatatcatggaaaaatttgaggttatcgtaggatacccctaactgttcaaacaaacgtggattgatatctaccatcgtgtccattcctaatgaatttccatattcaatcatatctttgaattggttcacgaccttttcttgatcacccttgatttgtagtagtgatgtaaaaatccgtttaaaaccatatttacttgctaatttaatatattttttggtttcctccacgcctacccggtctggatagattgaaatacctagtcttcccattaaaatttcctcctatttcattggtatacaccaataatgtattcgctttcagtatatcatctatgactaaaaatttcagctatattctgtttttttcttgtaaccgagtttgacgagtgaaccagcaccgtgatactctttttcataacctatactaaggacagtgaatagcacgatgacaaaattaattaattttttagccgagtatcagcgcgaaatcgaaagtcaacccatcgaattagacttagctttatttagccgtttggtcggactcccctttgaagccgtactaactcagccttcagcccctttagtggaagcttgcatgaaattaattgaatttgtagataatgaaaattacttgattttacctgctgatcgccaaatgttagaacaaattgcttttagcaatcgatatcaaagtgttcaaatatgcgatgtggtccaaggaccacaccgctttttagcggctacttttgttctttcaaaaaacactaaagtcattgcttttagaggccctaacggaaccttattaagttggaaagctgacctccatttttcattttcttccataaataagttaaaaatccaagcacaccaatatctcctccaagccctacagcacgataatcaaaacatctattgcgttggcttttctcaaggagcttccattgctgctctagcttgcatggatatttctgatacccatcgtcatcgaattcaaaccattatctttgacagtcccggattacctgatgaccattatcaaagtccaattcctattattgaattagttccaccgctgtcgttattcgcactagttggagaacacccttttcaccaaattaccattagcagctcttcaacagggatttggcagcacgatctttattcttgggaggcagattcacatggagcatttgctaaaaacattggaattaccaatcccacgactattcaacaccaatttattcaattattaccaagcaatattactggcgaaaatattgaccgtaccttgaatgttgctatcagtatttttagccaattaaatttccattccacttccgaacttattaaacattggaatcagtttaatgctctaattcaaactgaaatcacggtcgaaaatattgtagttaaaactgctattcttcgtctccaaaaattgatttttaaaaatgccgctttgaatctccagtcaattccattaaattaagtttcttaaattatggtatccttgaatcaaccatttatgaggagtgtgaatttaatgtcaaatgaatttccacaagctttaactatcgctggttctgattcagatggaagtgctggaatggaagcagatatgaacacattccaacgtcgtaacgttcatggaatgtgtgtcatgactgcctgcgtagccggtaactcttacggtattcaagcaagccacgccctacccaccgattttgttgatcaagaatttcaatctcttgcagctgattttaaaatccgtgctagtaaaactggcatgcttgctgacagtcccatgattgaaacagtcgttaaaaactatcaaaaatttgattttggaccactagtcttagatcccgtaattattaccaagcatggtgccttgttacttgaagaagaagctttcgaaactttaaagcaacaactcattccattggcaactgtgattactcctaatttttatgaagcaatcaaacttactggtattgatattaaaaatgacgatgataccatccaagctgctcatatcctacaggaaatgggtgctaaaaatgtgatgttgaagggttcgcacaaaccgggtgaacaaaccgaagttcgtgacttcgttctcttggaagatggctccagtttttggcttagtgaaccatacattgaaactgaccgggttaacggtactggcgatgtcctttcagcatgtatcactgctgaaatcgctaagggaactgatattccaactgctatccgtattgctaaaaaatttgttaccgctgcaattgccaacccaatcgcagtaggtcataagtatggacccgttaatcatttagcgaaattccaagcttaatccatttaaattaaaaacgcgaaacaaatttaagggtcaaggcccgcaacttgtttcgcgttttttatattagttttccgtatctttttcagtaacagtctgcactgccacatcattggcaccattatcagcagccgcatcggaatccgtagtggtagaattggcagttgaattattagccgtcgaattagcattcgaagtggtatttccagcattagccggagtgtagttactgccacctgtattacccgcagttccagtagttgctgccccaccagctggggtgttgttagcagcatccgtagtggtatcgactcccgtagtatctgcactttggtccgttgattgagtatctacactactttcttcactggaagacgattcatccatactaactgcatcagcatctgtagatgtcgatgcactattagccgcccactctgtatacgcgtctgaattattaataatagtaactttaattgttgaactagctgtatgcccactagccgttgatccaatttcaaattgaatcgacttaactttcttacctaaatgaacattgtaaactactttaccttcagcatctgccttggcaacttcggtttttcgtgtctttaaattggtaattttaacttctgccttggcattagttttaatattaattaaggcattacccaaagcattggttttctctttttttgtatctacttttaatttagttgctgttttttgaacagtatcctctttagttgttgtttctggcttagcattctttccacaagctgctagcaaaaataaggtcattattgaaactaaaattgtactaatctttttcaaagcttcatcctccaccacttcggttattaactttaattattacagtgtatttatcatcggtcaaacagaatttttcaaaatgcttgcaattgttttaaaatatccctatacttaagttactaataaaaagtaagtaactttaaaggggattttaaatatgtcaaattcattcttagatgcaattaaaaaacgtcgttcaatttacgctcttggtaaaaatgtttcactcagtgaagatgaaattactgatttaattaaagaagctatccgtcaaagtccttcagcttttaacagtcaaacggtccgcgccgtaatcctattcggtaaggcccatgatgaactatgggatggcattctagacattcttcatggtgaggttccgaacgaagaggctttccaagcttccaaagccaaggtggaaggagcttttaaggctggagttggtacagtattattctatactgatgaaaaagttatcgaggaccttaaaactaatttcccattgtataaggatgctttcgacatgtttggtgaacacggaatgggaattgccaacatggatgtttggacaacgcttgctaatgaaggcattggggcatcattacaacattacaatccaattgctgacaagttcatcgctgataaatttgatattccggctaactggacccttaaagcccaaatgccatttggttcaattgaacaacctgccggtgacaaagaattcatgaatgacgaagatcgttttcgcgttattaaataattaaaaagtacaaaaaataagctgtggtaaaagttaaaaactttccacagcttatttttattttaagatagcatgccacttttgataaacttcatcgaaacggtactcctgagctttagcgtaagcaccttggcttaattgagcccagagaacatcgtcacttaagattttttgaattcggcgcgccatctgtgcataatccccgttagtaacaatatacccattcttatctttttcaattaaactatgcaatccatacttagtatcaaaagataccactggaacgccgtgcgccatcgcttcaatcaggttcataccggcagcttcactaaccgaagtattgactataacttgcgcacgattataaaatgattgaatttcattatccgtaagataattaccaaagataacctgagcttgaactccacgttgttcaactaaatttttcatttcatttaacagattttggtcgttagtatatcccctaaattccaacgaagcgtcaggaaactgttcgagcaccttaaaaaaggcttttaaggcttccattggtcgtttatcagcttctagtcgaccactaaaaataattcgtcccacaattcggtcccgtaaccaaaccggtttggaattgattaattcgggactaatcgccacatcgggggcgacttgaacgtttaactcaggaaactgctctttaagttccaactgttgttcttgtgtaggaacaataattccatcaaaatcttgagcccggatttggagggcaattgaatatgcagcaaaaggagttccaccttgatccacgtgtgaaccatgcaaagcaacccatttagaggtagcattttctacatcagcaatcacatagtcaagctcacggtgatcggataccactacattatcggtcgtttgttgggtaacttcatttaagaaaaatagaaataactgatcttccgtgtcaaatcgataattctttccatgataattaactaatttccacatcgtaggctgtaattgcccttcaacattcatgtaggtattttcaagaaccacttcgcctgccaaattcaaaaaacgccgtacgcctaaggagccatcggggtgaaagtaatcaattgaagacttaaatccgcgccaatcaaagttttctcgactaacaacggtttcaaagcgatcgtaatattcaatatcacccactaaaccgaccgttccaggcataatattaattcgagctaattggcgaccggcatggtcgaccgttgagtagtcagctccatgttcgaccaattgatattcatttaatgccagttgcttaaattcgcgaactggtaattgaacgcgctctaccgcactagttccctgaaagaaatcatacatattcaaaacattggttgaatttaagttaactcgctcagcatccctaacccataagcgattataatctctagtaacataccgagcctgatcgccactggcgttaaatagcagggtacgattggcttgcgagtgttccactccagaattaaaagtgtaaatactacgactaacaaaatatttcattacttacggacctccccacgatattctggcatcgccttcaacttatctggccaacaattttcagcatcttgcaacaattcttcccacgcgtgccaaacattttcatccgagtaacgctcagctgaatcgtaggctccggttgaatatttctgggctaattgtgggtcttttagcactttaatcatggcttgagcgagggcttcataatctccataaggaaccaccttaccatttacaccatctcctacaatttcatttggtccataattaacatcgtatgaaaatgaaatcaatccatgagcaatgccttccattaccgccaaattaaatccttccattcgagaagttagaccaaacatcattgcgttattttcaactttatcaatatcggtagtgtaacccttcaatttgactacgtcttctaattgattggcttcgataacctcttctactaatcgtcgagcctcgtaattattagaaccatccgcatagccgtaaagatctaaggtaacttcagggactacctggtgaaccaatgcgacggctcggaccaaatcatctagatgtttttcccaagcaatccgcgcaaatgcaacaattttaccaaattggcgttctttaaccgcaactcgtttactgtttaacagttgttctggaacaatcccaactggaatagtgaataaatgtgttttgggttggaaacgagcccgtacatcttgggtctgctttttggtagcgctgataaatgcgtcataacgatccattgatttcaaggcaaactcatagtgttggtttaaagttgaatgcattggattttgagcatcagttgcatgcgaattgtgtaaatgaatcacccgataggcgggtttttccatatttaagagcgcccaatcacctaaatgatcccgatctaaaatatagatattaggttgcgtttctgaccaaaagtcattatttaaatcatcaaaaaaatgttttgtcagctcttcgattgtgtcaaattgataaacttttccagcttgcgttgttaatttccaggctgattgtttcatctcgccttgcgcattttttctggtgaaagcctcaatcgctactcgaccttctggtgttttccattcttcagtcccaatttgattatcgggggtataccactgactaagcgagataaaaccacgactatcataatgatcaactcggtaaagattaccaaatccatcaaagagttcagttgataacacatgatcatctttaatatcaacattgattctggcaactaattgaccatcaatggtttccgctaaataacgctggtgatcaaaatctgaactgaatttcagattttcgactcctaaatctaaatctggaggcgtgacaatcttattttcaacgtgcatcgcctgttggtagtaatcaaacatgctaattacatgttcatcatcgattcctgctaaggcggtaagtcgatgagtttctggactccaatctcgcaaaacaatacgagcctctcggtgcattttattaaagagcttaagacgctttaactgcgcgtgttcaattccggacttcttttctggcatttgtgcattaataaaaaatatcatttttcatttcctcgtgtttccacctgatttttccgttaattattagtccattatagtataatttagcttcttatttgtgaaatcaaggttaagaattaagctaaaaaaaacgaattaaaagtatcatcttttaattcgttttttaatttaaatttatttccgactcattctagtagcaattcgttcaccagtaagagtaactactgaaccaattaaaataataataattccaacaatcgtgttggtatgaattggatcacctaaaacaattagggataggattggagccagcgctggtttgataaagaaaatcaaagaagcaatagggacccccgcttcttccattacaaggaagtataaaccgaatcccaatccggttacaaaaaaacttatgtaggcgactaatagaatattagaccaggtgattccttggaagaatggaacattactgaaaccttgtaatccgctaagggcttgactgacagctggaatgtgagtaattgccatgaaaattcccaactcaatcgcacctgcaataaacgaaaaacacgtcattgtcattccgccaaagcctagcttattcgaacttaatcgagttaagatgccataaatggcgaaggtgattgaacttaaaagtcccagtgtaattcccattgggttagttaaattaaatggattaacaattacaagtaagcccgctaaagttaaaataacggccaacgtattagtccgtgacattttctctttcagtaaaactagtccgattaacatcccaaaggctgggttggcactcaacagaatcgcaatcgtggccggcaaggacatctgaattgctaattgatacaaggtcatactaaccaacacgcacgaaaatccagttaatgaaaaggctgcaatatctcgtcctgtcaagtgacgttgttcccttcttaatcgctgtaatgtaaaaggtagtaacaacaagccgcccaagaggaaacgcacaaaatttaattggatgggattgaaagttcctcccgcaattttaagcgcaatctccattgaactgaataaaaacgtggacatgatcacgtagatcagagttcgtaacttcaatgacaaaacttctttctcttttagaattaactcatctaccatcttaccactttatttttagcattctttgaaacaaaaaaagctgtagccaagaccaccgatatggtttactttgctacaactcatcattattttaccaagaagcttttctaactcctggaatctggccttcatgtgctagtcttctaaagtttagacgcgacattccaaacttccgcatgtaggcgtgtggccttccgtctaggctgtcacgccgatgcatcctagttggagaagcattacgaggaagctgacttagagctcggtaatctttattcgccttaagttcacgacgcaactctgcatatctagctaccatttcttcaattttttgttctttaataatcttagatgtttttgccaattttctacctacccttactttttatcagttaatagattatagctctttacttacttaaagtaaaacaaaaacattcatcataaaactaactgtaatcggtttcattgtgataaaatcaattataagaagacataggagggattgtattttgaagattaataaagaagagttccaaaacgtaaattggtacacgctttctaatgacaaccatgtttctgttaccatcagtaccctaggggctacggtagttgctgtaaatacccctgataaaaaagggaatgtcgaaaatattgtcttaggctttgataatccccaaacttatccaaagcacaacgattattttggtgcttcagttgcgcgggttgccggccggattaaagatggtaagtggcgcgattaccaattaaatcaaaatgaaggtcaaaatactttacacggaggtaataagccttcacttagctacgttaattggaagaaaatcagtaaatttatccgcccagaagaagtcggtttagttcttaaacgttttagtattgacggtgaaaatggctttcctggcgatttaaccatcgatgctattttccgtttaaataaccgaaatgaattttcgataacttatatcggtcacgcttctaaacaaaccctcttcaaccccactaatcatatgtactttaatcttagcggggatgctaagcgttcaattaagcaacatcaaattgaattaaaaagcgatgtaatcgcagaagttgatgcagagttaattcccactggtaatttattaaacgtggatggcacaccgtatgacttgcaccatccaacttcaatgcaatccatgcttgatcaagtatcagacggattagacactgctttcaaagttgaacctagcatcgaagcacctcaacttacgctggaagatcctgaatctggtcgtaagatacgggttcaaacttctgccaatgcctttaccctctttactactaatgagccacaagagccattcaaaattaatggcaatcaagatatggcagccaacatcggattagcaatcgaacctcaaatgcttcccgatgccatccaccattccggcttcggtaatatcattatttctccatctaaaccgatgatgtatcggaacgtttactatttaaactaacaattttttgaaaaaggttctgtaatcagcttatagtttgattgcaggacctttttatgataatttaggtgagttattaatgcacctcaacacaattatgactaaatcaataacattgggggctctgctatgtttataattggtatttcgataattatttttttgatttccggaacttatttatatttagatcgtcgagattttattgcggggattgtttttgccggtagttgcattaacttagctttattatccactttgtggattgctaattatctggcaggaggttcaaggactggaattgttagccttacggtcttcctacttttaggaattgttttgacgccgttagtaatcggcttcagtttgattgttaacacctacattatgcaaactcgtgaaggcaaaagtttaactgccaaattatcgcttattttaggccttaattttttattcatgttggttgctggtttagctattttgtttttgaatcaatttttaggacgcttcgttggaattttgcttacccttttagggattgatgtaactttaactttcatttttgtttgttatctcttttattcatttctttatcaagtggttcctatcaaaggcaacgtggattatattattgttttaggagcgggggtacgatctgaaaccgtaactccactcttaaaaggacgcttggataaagccctcgaatattatcgaagacaaaatggcgctgtgaaaattgtggtaagtggcggacaaggacctgatgaacccgtctcagaagcttttgccatggctaagtacttgagaaaccaatccgtacccgaagacaaaattattttagaagaccaatctactactactttcgaaaatatgcagttttccaagcagaaaattgaagccgattggcagggaacccaaccgcctcaaattatttttgctactaataattaccacgtcttacgtggcgtaatctatgcgcgtaaagctggcttaaatgctaacggtgtaggatcaccaacctcattctactttttacctagtgctttaatccgtgaatacattgcactattagttatctataaaaaattaactgctttaattttactaggttggatagccttgggaattttattaatgctctaaaaactaggaggtttacttatgcgaaaaggaatgattatcagtggcgtggtcgtcgtaattcttttaattacttttggaagcgcctatttctggtataactctaactatggtactcaggattactacactcaaatcgtcgataaaggcactaaatttgtggaaaaagatgattccaatcgtagttatgtgaattatgcttaccaccaacctgcttataaccaagctggtcaaaagataacggttaaatttaacggaaacctagaacgtccattaaagctccacgcatatttgaaaattggctacaatgcgaaacgaaatcaagttatttcttggagtaaagttgataaaaaagacgtccccaaggcagccttgaaacaaattaatccttaatttcttcaaagcactttaacgttagcttttttcaaaaatgtgccttaaaatatgggtagaggtgatggataatgacacgaaaaattggaatcattggtatgggtcacgttggtcaagcagtcgctcaacaaattatcacaaacggctacgctgacgacctagttttaatagataaaaatgaagcaaaggttggtgctgatgcacttgattttgaagatgcaatgcccaatttaaccagtcacacaaacattatcgtaaatgattatcgtgccctcaaagatgcagacgtaattatttctgctttgggtaagattgctttaactgataaccctgataatgaccgttttgctgaacttccgcacaaccgtgaacaagttcaggcggtcgctgaagccattaaggcatctggatttaatggtattttaattccaattactaatccagtagatgtaattaccgcactttaccaagaagccaccggcttacctaaagcacatgttattggaactggtactctacttgattcagcccgcatgaagcgcgccgccggcaaaggtttaggcgttgaccctcgctcggtatctggatataacctcggcgaacatggtaattcacaatttaccgcttggtccacggttaccgttcttgaccaaccaatcaaaaagttagctcaagctcggaatttagacttagatcaaatcaacgaagacgctcggatgggcggtcgctatgtaatggttggtaaacactatactaactatggggttgctgccgctgccgttcgtttggctaatgtagttttaaatgatgctcatgaagttcttcccgtttccaattatcgtgaagaatatggtacctatctttcatatccggccgtgatcggacgtgacggtattttagaacagctccaactcgaacttaccgatgaagaacgctacaagttacgtcgttcagccgacttcatcaccgaaaaaatcaaagaatctaagtaaaaaataaaaaacttcaatctttgcttaatcgcgattgaagttttttattttcgtcttactttttgtacttattttcacatgaagcaaagatgcctaatcgaatgtcaaatccgaggcagcttacgttcatttcgtcagctttttattgaatttttaagaatgcatcggcaatattaaagcttggatcgcatttcacttccacttgatctcctaaatcgtggatttgaaatttaatccattggtcccccactaaggcctcgccattgcgagcttgtagcactgacaatactaaatcatcaccgccttttaaaataccgcgtaccgtattatcgccacgcatcacgttagtaactcctaacactagatcaggtgtttctacttcactatgtccaagtctaactttataaatcggcactactacactcataataagcatcctcccatcaacctaaaaattacttgcattaattacctcgaattatatcggcttgagtaagctttagcaaacattctgctcaacttataatatatatattgcttattactttacttttttgtttacacgcttatataatgtgaccacaaactaagaaaaggggtgcaataatttgaaaaatattaatgttttattagctgccgacgaaaattatgccgaccaactacagatcaccataaaaacaacacttgaaaacctaaacaaaaaaacacgtgttaattttattgtgctatctaacaaccttagtaattctactaagctagctttaaaaaaacttgcacatggattgcacacggttgagtgccttgatttggatccatcggtctttgctttttgtcctaccaacagccatattaacaaaactgcatattaccgaattttggctccccaattactagcaaaacgtaatatcgatcgaattctttacttagatgttgatctattggttcgccacgatttaaccgagttgtacgacgcggaattgaaccataacattgtgggtgcggtgatcgataccggccaagcttttgctcttaatcgtctaggagtcgacccagtagttgctgcaaataatatctatttcaactctggaattttagtgattgatattaaaaagtggaatgaaaaccatattaccgagaaaactttaaattacattaaacatcaatcacatctcattattttccatgatcaggacgccttaaatgccgttctggctggtcatgttcaaatgctacatcctaaatggaacttacaaaattcgattgttttcagaaaacaccgtccaattaacgaagcctacgatcaattgatcaacgaagccatcaaaaatccggcaatcgtccattttacaacacatgaaaaaccttggaaaacgcttagtgaacatccttatttggatgaataccacgaagaacttaacgaattagaaatcaatcgtggcgtggttaatgttatttctgccgctaattcagcttttgtggaagctttggcaacttcttatatttcaattttggagaatgactcggaaaatcaatacaacttctaccttctcccagatcatctagatcaacgtgatatgttaattttaggaagtgtaatttcacgttacgacaacgcttcaattaaaatcgttaaagttgatgaaaaactactagaaaatgcggttgaaagtgatcgcatcctaaaatctgcctattatcgaatcttagcaccagaattgttgccaaatattaatcgtgccatttaccttgattgcgatattatcgctaacaccaatctacatgatttatggcaaacctcactggaaggtaatgttctagccgccgtagaagatgctggtttccatgatcgattagaacacatgggtatcacgcatgataatagtaaatatttcaactctggcatgatgctaattgacctagttagctggcgttcccaagcagttactcaacgcgtcttagactatattaaccatcatccagaaaaactacgtttccatgatcaagatgcgctaaacgcgattttatacgacaagtggttacacttacatccaaaatggaatgcccaatctaacattgtgttagacgcacttgttccaccacggactgaacttttgaaactttacgctgaaacacgtgaaaatccaaaattaattcatttctgtggtcacgtcaaaccttggcatgcagaaagtaaacacccttatactaatgtctacttgaagtacaacaagaaactacgtgaaccagtacggacttaatttttcataaataaaaggattgatatggaatcatctccataccaatccttttatgtcgttcaattaccatttcaaccttttacttacttcttatctttcttttctttcattagccgctgattagctcgttccccatctttaattttttgccgatactttcgtcttcctaaatacgccttaatcacaaatggaatctggacaattacataaattataaaaatgatgagtacaattcgatacatttcatccctccgtcaaaatgatttggctgtactatactacaaaatccagtaaaaatcctttagttaaccttctttgtatagaattcccactttttttaactgttccttagctttttcgatattttccattttatccgctgccaaagtatggctatggatgccatcggttaattcagatagcaagtgtcctttggcttcccgtacatgttgcataaactgtttgacatcattgctattttgcacacggatttgtcccactagttgtccgtaaagtgggtggtcaaccataacgtctttgatcgtcacctgttctttaacaattagttccatttctcgctctgcttgatcggggaaatgacgacaaacgatcatttcttcaaatcgatgatttttggcatattcatagcctctcgaagttgaaataatcggctccccttgcgcacgcaacaaagctatatccccaacaatagtttgtcggctaacctcaaattgtttagccaatgtgcctgctttgattggtgttttagtttctaatagttgatttttgatagctatttttcgattaattttcataagtcattactccttgagtatattttatcagaaaatccccgttacaagtgtcaagacattaattttaaataaatcattgataaatattgttttatgttgtaatcttgtattcaactcagagtgtgtcttgacaccaaaaaggagaatgatgattttgaatggaatttcaaactataaaaaattactagcagcttcgggggtagcctggctttttgatgccatggacgttggtatattatcttttgtaattgctgctttaacgtcagagtggcatttaactgaatcacaggttggtatgattggtagtatcagttcacttgggatggctgtaggcgctattttatttggagcgctggccgaccgttacaatcgaaaaacaattttaattattagtttactaattttctcaatttttaacggtatttcagctttcaccactacctatgcggcttttgttatgattcgttttattgtcggttgtggattgggtggtgaactacctgttgcttcgactttaatctcggagagcgcccctgctcatgttcgagggcgggcagtagtgctcctcgaaagtttttgggctggcggttggttaatttcggctttaatctcttattttgtcattcccagttggggctggcggattgccgtgtttatcacttccttagcggcgctctatgccttggttctccgttttagtattcgcgaagcagattcaaatcattcttttacacccaaagctcgcctagccttacgtttaaaaaatatttggagtcgtccctatgctaaagccacgttgatgctttggattgtttggtttatggttgtattctcgtattatgggatgtttctttggctgcctagcgtcatggtgatgaaggggtatagtattgttcacagttttggttatgtgttaatcatgactgtggcacaacttccgggttactttatggcagcttggttaattgagcgatgggggcgcaaatggactttgatggttttcttattcggtactgccgtcagtgccatcgtctttggttttgctcaagggctgatgatgttattgttagctggtattttactatccttctttaatcttggtgcttggggcgcactctatgcctattctccggagcaatatcctgaagaaattcgtggaacaggttccgggctagcagccggaattgggcgcatcggtggaatcgtaggccctcttttagtgggatttttaactgaaaaaggcgttgctttatcaactacttttataattttcttcatttccattatgatagctgtaattgcaatcggcttcctaggtaaagaaactatggaaaaataatttttatgggaaaatttttacgctattactagctttgatgctcttctagtatcacttctatagcaccttaattagggaggtatttgccacaactccatcaaaagcgctaaaatagtgtctataaaattagaagagagaaggtattccattggaaaaagcagctttaatactagaaggcggcgctctcagatcattttttactagtgccgttttggattattttctcgaaaagcaaatggatttcgagtacatccatggagtttcagctggaaccatggccgctatgaattacatttcaaagcaaaaaagacgttccgctgatgttaatctccattttcttcatgataaacgttatattggttttaacaacctcattcgtaatggtggaatctttaacttagattttttgttttcacctgaatgttatgattacagcccctttgactataaagcttataatgaaagtaaacagatttttgaaattaccgctaccaacgtcttaactggtaaagccgatattttccgtaaaacggataccgatggtcaagaagaagccgtcaaagcttcagccagtatgccattagtatctgatatccgggtcgttaatcaccagccatacttagatggcggaatcgctgactcgattcctttcagacgagctcaggaattaggctacgaaaagatcgtcgtggtcttaactcgcgacattagctaccgtaaaccggaaaatagccgcgctatgaatcgtttagttaagtttagataccgtgattttccacgttttgtccaagcttttgcagatcgtccacaacaatataatcgttcattagcagaaatcgaacgcttagaacgtgaaggaaaaatctttgtaatacgtccccaagaacccgtttcagtatctcgggttgaacgtgatgataaaaagctcatggccctttacgaaaaaggaactgaagttattcaaaatcaatttgcagatttacagaaatatttagcacaataagtaaaaccctccgaaaaattaattttcagagggttttactttatttttcaacgattacttgttccatcacaacatctacgttagggcgatcttcgccattacgttttaccttactaattgctttaacaacatccatcccttcgaacacttgtccgaagaccgtatgccgaccatctagccagggagttcctccttgacgatatgcttccacaatttcttcaggaaattctgccgctttaagttgtttaatcattcgcttaggaacattactgttagtaacgataaagaattgactaccattagtatttggaccggcgttagccatagatagggccccgtttaagttatagagcttatttgaaaattcaccttcaaacgttctgccatagatgctttcgccacccataccagttcccgtaggatcaccaccttgaatcataaaatctgggatcacccgatgaaaaataacgccgttgtagtagcccttctctgctaattcaataaagtttttaactgttttaggtaccaattcatcaaaaagttgaattttgatgtcaccttggttagttttaatagttacttttgtaccagttgtattttctaagtctaattgtggataagccatttattaattctcctgcttcttttttttggtcataaaccattctaatctatttgaaatataaaaacacgtctaaagtaacggattataaataaaggatttttaccacataccaatcactttcattcaaagcgatccaaccccaattacaatgtaaaccaaaaccacacccagaatggcattcatccgccaccaatctttttgctttataaagcccgaaccaaatagaacggagacaggctctaaagtcatctattttactcctctatttatcataattagtcatctcaatgggaaccacccactgatcaaattgctcagcggtaactttaccagattttagggcagcttctttcagcgtggtcccatctttttcagcctgctgagcgattttagcgctatcgtggtagccaatatgaggagataaggcggtaactgtcatcagggaatggttaactaattcttccatccgttctgcattaacttctaatccagcgatcatcaagtcggtaaaactacaaatcgtaccttctaatagagtggttgattccaagaaagagctgatgataactggtttataaacattcatttcaaaattaccttggcttgcagctaaatcaatcgcaacgtcattagccataacccgcactgccgccatggtaagggcctctgcttgagttggattgactttacctggcatgattgatgatccgggctcgtttgctggtagtttcaactcgccatatcctgcccgcggaccactacccaagaaacgaatatcattagcaattttcatcaaatcactcgccaaagttttaatcgctccgtgaaccacattcaaaccggagtgatgcgctagtccataaaatttgttagaatctgccgtgaattcaaagtggtagacttcgctcatctgagctgcaattatggacgaaaaatgcggagctgcatttaaacccgttccgaccgctgtaccccccattgccaattcacttagcgttgaattaagttcttttaagtattccaaatcatgttcaagggcgctcttccatccactaatttcttggccaaaagttagtggagtcgcatcctggaggtgagttcgtccaattttaaccacgttccaatattgcttttgtttttggtctaattgctcaattaaatgttgaactgcctcttccaaacgtactaccgctactgcagctgtaatattcatggccgttgggaaaatatcgtttgaactttgtccatggttaacatcatcattaggcaaaatttctatttccgcattaattttagcagccatatgggccaccacttcgtttacattcatgttagtttgcgttcccgaaccggtttgataaactaccagcggaaaatctttccgtaattcagcatcatccagtgctagcagacgatcaatagctactacaattaaatccgctttttcagcagccattgattgttcctttttattagcgatggctgccgcttttttaatctgtagaagagctttgataatttccaggggcatcttggcaccagtcgcaaagttatgacgacttctttcagtttgggctccccaaagtgcgtctactgggatttggacgggcccaagggtatcttcttctgtacgatatttttccatattatgacctccgaaattaattgtctaagtcgcattcctactaatttgcttcgtttttattataaaggactcccgataaagcaccagtgaaatttaaaataaaaatacgacccacctaggattatccatcttaggtgaatcgtatttaataactaataattcttacaggtttaaacgagcttaaaatcttactaattaatggctgagataaagcgcgcaaatgcagcttcaccggcgtcatcccatttaaagactcctgcatcagctaaaactcgcgcaaaaacatttccaaccgcagtatttaccacggcagtaacattttctgcggtaattgaatgtgttgccttcaattgatccgcccaagcttgatgcatttctgccatttggttagtttgacccaataggtacttttctacttctaccaattctgtctttaaccgagctggtaaaatcgctcttcccattacttcaatcaaaccaatgttttcttttttgatgtgttgaacatcttgatggggatggaaaataccatctggaaattcggctgaggtttgattatctcggagtactacatccaaaacatagttttctccatccttgtacgcaatcggcgtcgtcgtatgatgacgagttccgtccgtgaacgctcttacatcaacactttcatcagaatagttcatccacgcatcatgaattttaacagcagcatctgtcaatgccaccacatcactaccaactaaccgaattgttgacattggccatttcacaattccagcttccacacctgctactcctaaattaatcgttctagcaatgggagccttcatcattggaaatacatgacgtccgccttggtaatgttcgtgtgataacatcgaacctcctacaatgggtaagtcagcgttactccctacaaagtagtgaggtaactgtttaacaatttcaagtaaattggtaaacgtctgacgattaatcaccatggggcggtgaatttggtctaagaaaatagaatgttcattgaaatatgcgtatggtgaatattggaagccccaagtttcaccacccaaggtcatccgaataattcgatggttgctacgtgatgggtaacccaaacgtcctaaataaccttcattttgcatgcataattggcataatggataaccatcctgaggttgattacgagcagctgcaattgctttaggatctttttctggtttagaaaggttaatggtaatttcaagttcaccaaaatcagttttcgctgggaaagatacattcttagcaatggcccgtgttttaatatagtcattagttttacttaaattaaagaaataatccgtcgctgctttagggctaacttgatacttatcccaaaaacgttgatttaaaatcgaaggtaatggcgtaactaaatccattaattgatctgccaaaatgcttcggtctgattgagcatcttcaattttaccgttttgaaccgcagttttaactaaggcatctactaagctagtcacttgttcatcggtagcttcaaccggttgatcttcacccactaaacctaaaatccgattatgcacataaattcggtctaaattggtgtatggtgatggcgaatcgattacaacttggacaaattgttctaagctactcattaggcttgtcctcctcggtcatcgtatccagctggatggttgactttccaattccaagcagttttgataatttccttaacatcatcatattgaggttgccaacctaaaatttcacgtgctttatcactcgctgcgattaaagtactagggtcgccagctcgtcttggtgccataacagctggaatttcctttcctgtcacttcccgagcagcttctaacatttggcgattggagaagcctgttgaagatccgagattgaatgcgttactatcatgaccttgtttgagatattctagagctaaaatatgagcatcagccaaatcaacgacgtggacgtaatcgcgtacattagtaccatcaacagtaggatagtcatccccaaaaatttgcaactgatcccgttcaccagcagccacttgtaagataataggtactaagtgtgtttctggttgatggtcttccccaatactgccatctggtttagcaccagcaacgttaaagtagcgtaaagccacaaacttaatgccatcagccacatctgaccaatgcatgattttttccattgctaacttactttcaccatatggattagttggaacttgtggatcagattcttgaattggtacccgttctggttcgccataagtagccgctgtagatgaaaatacaatccgtttcacatcatgtttagccattacttcaagaagtttaaccatcccagcagtattattatcaaaatacttcaaaggatctttcattgattcaggaaccacggaaaacgcagcaaaatgaattaccccttctacgttttctttggtgaagactgaatccataaattcaacatctcgtacatcgccttcgtaaaaacgagcttgctggtttacggccgcgcggtgtccagtaaccaagttatcaacaaccgctacatcgtaacctttcgtaattaatcgatcaactgcatgggagccgatataaccggcaccacctaaaactaagaccgccattctaattcctcctcaatctctcaatacgtattactatttaaaaattttcactaatattaaagttctttaggtccatcagcaatttcagcaatatagaaatcagcatcataaccaattgtatcgcgataaactttaccaacattttccttgaaagcttcaacttggtctttttcaacaattgcgataccacaaccaccaaaaccagcaccagtcattcgagcacctaatacaccaggttgtttccaagctgtttcagctaaagtgtctaattccttacccgttacttcataatcaaagtgtaatgaaacgtgtgaagcagtaactaattcaccaaaagttgttaagtcgtcatctgccaaagccttagttgccttgatggttctttgattttcaaaaacagcgtgacgtgcgcgtttaattaaagtttcatcattaattaagtaagctgcttcatcaaattcatcattagttaaatcacctaaagtcttgatgtctaacttagtttgtaaacgacgcaatgcttcttcacattcagaacgacgttcattatatttagaatctgcgagttcacgacgtttattagtattcataattacaatgacgtgattgcctaatttaaccggagcataagaataatcaagtgtgttagtatccagcaagattgcttgatctttcttacccattccgaccgcgaattggtccatgataccagagttaacaccgacatagttgttttcacacttctggccaatcttaactagatctaattgactaacgcctaaatcaaaggccgcgtttaaaactgctccggttaataattcaattgaagctgaagaagataagcccgcaccatctggcatatttccgtgaacgtagagatcgaagccatggtcaaacttaactcctgttttgactaattcattcatcattcctttaggataattagtccaacctgcagccttatcgtaatccaaagcattgacatcaaaactaacaactccagcatctggaatattagctgagtacattcttaccgtattatcggtacgaggagcataaactccgtaagttccgattgtaattgcacatgggaatacgtgaccaccattgtaatctgtatgttcaccaattaaattgattcgtccaggtgaaaagaaaaccctttcaggattggtgtcaaaaatttcggaaaattctctttttaagtcgtttgcgttcatgatgtgtctcctccataattttactaaaattttattaacttgaatatatagcttttaccatcacttgtcaatacctctttaatccatttacaacaaaaatggtagcgcttcattaaaaaacgatagtgttatggatttagggttacttacagcttactaaatcctccaaaaacattaattttggttaaattttaactaaaacaacgtatacaaatttagggttatgttctatcatttcattgtaagcgttttatattttggttacgaaaggagttctattatgcaagcaaatcttcagtggcttgatgatcctgaagtttttcgagtcaatcaactacctgcccatagcgaccaccattactatcgtgatttagacgaaatccgtacaggtagtagtagctttattaaaagtctcaacggcccttggcgttttcactttgcgtccaccccgtctgaacgtccactccatttttattcacctgattttgatagtgctgattttgatacgatacaagtaccagggcatatcgaattagcaggctacagtcaaattcaatatatcaacactctctacccttgggaaggaaaaatttatcgtcgtcccccttacacacttaatcaagaccaattaaaagttggattatttagcgatgctgctgataacagtgtcggctcttatttaaaacaatttgaccttgatgattcatttaaaaatcagcgagttatcattcaatttcaaggagttgaagaagcattatacgtttggttgaatggccattttattggttatgctgaagatagcttcactccttcagaatttgatctaaccccctatcttcaagaccaagataatcttttagctgtacaggtttataaaagaagtacggcagcccttattgaagatcaagatatgtaccgcttttctggtatttttcgtgatgttaatctcctcgctcttccggccgcccatgttgtggatttagacatcaaaccggaggtaaaagatgattttgagcgcggtaccttggcagttactgctgacgtttctggtactgatgctatcttagaactaaccgttacgaatcaaaataaacaggtagtggccagtcagacccaaagcggaatgggtaaggtcctgtttgattccatgccgtttgataatttgaaactatggtcaccaacaagccccaccttgcatcagttgttgattaaagtctacaacaatcagcatcaactcttggaggtcgttccttatcaatttggttttcgacgagtggaattacgtgaggataaagtcatttatgttaataaccaacatttgattctcaatggggttaatcgccacgagtggaatgcacatagtgggcgcgtcattaccatgcaagatatgcagaacgatattcaaaccatgcttgataataatatcaacgctgttcgaacttgccattatcctgatcaactaccgtggtacgtactatgcgatcaagccggtctttacgtcatggccgaaaataacctagaatctcatggttcgtggcaaaaaatgggagctgttgaaccttcctataacgttcctggggataatcctcattggttagcggcagtcgttgatcgggctcgttccaactatgaatggttcaaaaaccacccatccattattttctggtcattaggcaacgaatcctttgctggtgaagatattgcggctatgcaaactttctataaagaacatgacgcatctcgactggttcattatgaaggtgtcgttcgtgctccagaattacgcgatcgtatttctgatgtagaaagccgtatgtacgaaactccagctaacatcgctagctatctagaaaataatcccgataaacctttcttaaactgtgaatatatgcatgatatgggaaactctttagggagtatgcaatcgtataatgatttaattgataaatacccaatgtatcaaggtggcttcatttgggacttcattgatcaagctctgttagttcatgatccaatcacccagcaagacgtcctacgatacggtggtgatttcgatgaacgccattccgactatgagttttctggtgatggattactatttgctgatcgaacccctaaaccagcaatgcaggaggtgaaatactattatggattacacaaataatcaattacacgtcatatatggcgatgccagtttaggattagaaggtcctaactttcactatctttttagttacgaacgaggcgggcttgaatctttagtggttaaccaaaaagagtggctctaccgcacaccaactccgctattttggcgagcaactactgataatgatcatggaaatggttttgatgttaaagctgcacaatggtacgcagccgatcgattcacaacttgccaaaagattgacctaacagtggatgggcaactcgttcaaccgcttcctattgctccccttaataatcgctataccaaccatgaaatggcaaatcaagtggcgttaacctaccatttcgttactcccacggtgccaagcacttcggtaagcattacctatgcggttgctagtgatggtaatattaagatcatgacccattttgcaggacgtgaaggtttacctgagctatcagcatttggactacgtttcattatgcccacgaccgctaccggttttgactaccaaggactttctggggaaacttatcccgatcgtctagcaggggcaactcaaggtcaattccacgttgacggattaccagtgaccccctatcttgttcctcaagaatgtggcatgcgcatgcaaaccagtcaactaacggtaactcgttcgactactcaaaataacgccgatcaaagcaagcaaccttttagccttactttcagccaggcagatcagccgtttgctttcagttgtttaccatatactgctgcagagcttgaacaagccactcatcttgaagaactaccattaccaagacgaaccgtgctttcgatctacggggcggttcgcggtgtcggtggaatcgatagttggggagcagatgttgaagcaaaataccacatccctgctaaccaagatttagatttcagttttaatattcatttctaaaataaagccgatgctggaaagatttaaattctccaacatcggcttttaatatgcaaaaaaagaacaatcaatgaataaatcattgattgtccttttaaaatccaactttaattagataatcccgtattggataacttcaatacatcttcgctatccttaacgtcttcacccagctctttgagataatcaaattcaggcatatccttgttggtaatgactaccattacagtatcatcaaggcctgcttttttaattgctggctgccagaattcaattaatttttgtccttgtttaacgtgatcgcctttttcaacatattgaacaaatcccgtaccacgcatttcaacggtaccaattccgatatgaatcaaggttaagacgcctgtgtcagaacgaagtccaatcgcatggcgagttgggaaagttgctacaacttcaccatcaaatggagctaaaacttgaccatcggtaggtttaattgcaaatcctttacccatgcttccactcgcaaatgtctcatctgcaacggtgtctaaactgattaattttcctgaaaccggattacggtaaagagttgtaattccgtcttctttttcaatttctgcaggtgtttcatctgtttccaaatgtgttgaccaagttttttccagctcgtcaacgatttcagcatgcattttttcgtctaatttaaccttcttgaagaagatgaaggctccaattaaaatcatagctgctggaacaccaaacatcatcaacttgaaaatagcttgtccgtgggaagttacgtccccagcagttgctccagcggtcatgccagcccaaacggcagttaaaccaactacaccgtttgaaatagctccacctaatttatcaagcaaaggacgaacagatagagttaatgattcgtcacggtgaccaaatttcaattgtccatattcaacagaatcacttaaaaccatcaaaacaactaagaagataagtggttgtggaatgtagaatagtacggcagaagttaagatcattggtaatgactgcccggcaagtgcaaacataatcaaagcaatgatcatgactgaaatagctaagaagaatactttacgacggctaaacttctttgccaatggtgggaaggccaatacggcgaacaccccaatgatagcgtttaatgaaccaagtaacgtaaatttcgaagcatcacctaaaatgtaagtgaagtagtaaagttcaagtgagttagtaattgccataccggccgtgtaaattccgtaagtcaaagataaccacattaattggtcattacgagccaatactttgaaaacttgtttgaaagttgttttttcagtatttttacgtaattcagaatcattttctttagttcccactgctacagctaaagctgaaatcaaagcaaccgcagcgataataatcccgaaggccatccaaccacgattatcaccttgtccgctgttcgccttggttgaaaacatcaaaacgattggcataacgactacaccaacgatattttgtccaatgttagaaccaacccgggcataggtagctgttttttcacgttctgctgaatcaaatgaaatcgcaggaatcattgaccagaacccaacatctttaaatgaatagaaaatatccattgtaatatataaaatagcaaaaacaattaagtataaaattgggttagatgtatttaaaccacctaaactggtaaataaaagtgctaaaacaactgaaccaatcgttccaccagtaacaatccaaggcttgaaatgaccccagcgtgaattggtattatcaatcgcgttaccaattagtggatcaattgcaagttctacgaaacgtaacgctgcaatgatcatcgtaatgtacgcgatcattttagttccttgagccccactactcttatcaaataaatgggaagtcacgaacataataaaataggtcgataatgttgcataaaacgcatcatgaccaaatgcaccaaatgagtaagctagtcgcgaagtgattttacgacttttgctttgtttaacttctgcatccataatctataccacatctcctttaattatctatgcactaaatgtaatcgttttcagagaggatgtcaatgttttttagtaaaatttgcttaattattttagtaaattagtatttaaacgacctagtccgcttctcagaccaatttatcgttgcccatagccaactattccaatcttttttcgattttaattttggtgttttaggccactcgatgtagttttactacctactttttaaattatttaaccattaaaaaagcgctcggtttttacaccttacgcttaatttagatttagtttaaacgttcatattgataacgaatagtatttgtaactggcttacctggacgtaaaacaatatcaccaaaatcagaatgattgattgcatcaggtaatgtttgtgcctcagtagctaaagcattgtactcatgagctgcttcttggtcgggatcaaatgggttcgccgtgaatacaactagtccgttgcgatctgaataaagctttactcgacgtttaccatcagtatcacctaccattgcaataggagtagtttcactcggattaacttcgtaagcatcatcaaattcaatcccaccattttcagcgtttaactgtttcaaggcgtcctcaataggttgttcttgattaaaatcataggcggttgctttaactgaaagcttcttaccagtggggactttttcttcatcaaattcaaggtgagccgcactgttaatttgcaaccattgtttagccaaacttgttcgatcatccgttgtattccaataaacatgattcgttgggttaaagagcgtcgcagcgtccgtatcacccgtaaatgaaatcgaaacttgattttgattgtctagggtaaatttaatttctacatcgagatttccggggtaattatcatcactcgccttaatatgtttcgataaaatcacgctaacttgatcatcatcttcactaaatttaccatcgaagtttaaggtattaaaaccgtggtcaccaccgtgcaatgaatgagtttgttcgttcatctcaacttggtattcttgatcatcaatcttaaatttagctccaccgattcgtccagcaactcgcccaattgattgacaaaggcaatagcctacgcggtgataatcagccatgctatcaagtccccaaattaatgagtgttccaccccatcctcattaactacgaattcttgccatgttcctccatagcttaaaactgaaattctagtttgttggtcattaaccaatgtataacgtatgacatcctgaccatctatttgatcaaatacttcttttttagtttccaatattatgacacctccgcattaattaaaccgctttcatttttagtataccaaatttggctgaggttgagtaaatattttagttaaaataaaaagactcatagtggttggataatttaatccgaccactatgagtctttcacttctattctatttcgtactagctcgttctaccaaccttgtacccagttccacacgttgcgtggtggtgcgaccggtcaaacgactcattactaaattgactgctgtggcacccatcaactccgtatcaacgttgactgcacttaattcaggataaacaaaagtagctaatgaagtattgttaaaactgaatagcttaactctgtctggtactttaatgccatttgtctggagtgctttcaacgccccagctgccatgggatcattggccacaaaaaacgctttaggtaactgatctccgagcacatcaattgccttttgcatcattttagaaccagattcgctagtataatcaccctcgaatacaaattccggtttaaaggcgttacgcttggtcattgcggccttaaatcctaacattcgacgatctgtaacagttaattggtgatctgtcgtcatttctaacccatggataatcccaatatcttcaatcccctgttgccagaaataatcgactactttttcggtggctaattgaaaatcagttatcacactgtcaaagccagcttcaaattgatcatcgtccacaaaaactaaattatcagtaacggctgcaatttcttcaacttgcggtttactaaattttcctactgctattactgcatcaacatttgggcctagttcttgtaaattattctgaaaaattcgtgtcacttcgaattgattgtcttgtccacgttgctcaattcccattcgaatcgacatataatacaagtcatcttgttcttcagtttctgagtaccattgaacaattgccaagcgttttctagttgttaaattattatgtcgtttatttttggaatagtgtagggcttcggcggtttttaaaattttttgtctagtttcatcgccaactgaaagagacgcatctttattcagcacgcgtgatacggtcgctaacgatacgccaactttatccgcaatatcttttaatgtggctgccatgagctgcctcctttaagttacttaattgtgcataaattcatttttctattaatgtacctcgactggcacacaatcgtgatagcactcatgtaaaactttatcattaaatattggaattggcgactacaaaagtccctacttttaataaaaatagttaaaattatcattttatttggtttaaaatacatattatttagctactcaacaaaggcttgggaacctaacaaataacttatcaattagactaaaaagaagattaaccttaagtaagaattaaccttctttaatcatcgacactaactcctttaccacttttgaaaacgctaacataaacactgtcagtttaatatagtttttgtgtcggatcaatgcttgaattattttaaatgattggtagattgtaaaattaatccgaacgctgttcggacaaaaaagatcagcttcctttaaaatggtgtttaccacaaacccatcttttaggagctgatcttttgtctagtataatctattccgaacgaattaaaatcgaaaccttttgtgaactagggctgtccaatatccaaatgggcgtttggtattgttaatgctttaaatacgacaaggaggaattttatggcaaaagaaatcggcattatcgttggtagtttgcgtgaaggttcattaaatcgacttgtggcaaaaacatttgaaagtatcttacctaaagaatatgaggcaacgtggattgagattggtgatttgccattgtataacgaagatttagatcagggtgaaatcccagcagaatggcaaagactacgtgatactgtgcaaaatgtagcaggggtaatgttctttactcctgaatataatcgttcggtaccagcggctttaaagaacgcaattgatgttggttctagacccatgggcgaaaacgtttggggtggcaaaccagctttggttgtatcggcttcccctggagcaattggtgggtttggggcaaaccatcaccttcgccagtccttggtatttgttgatatgccaacccttcaacaaccggaagcttatattggtagtgttccgcaacatctggatggtgaccattttgatcaatcgactacgcaattctttagtaccattcttgattcatatttagattttttagagcgttttactaactaacttaaactaaattatgcaaataaaaatagcctaaccagacggaaattccgtgggttaggctatttttcattgtgctttttcccctttagcacgtgatcagcatgttcaagagtttcattaacaatatctaagatatgcggatcatcgagttcataaaaaatcgatttaccatcacgtttagttgaaactaactggtatttacgcaaatctgatagatggtgagagaccaacgactgatcgagatggagaagttctacaatttcagaaacactgaggctctgctgcgacagaatgtataaaatttgaagtcgcaccgggtttttaagcaagctaagaattttttgggtctcagtgagcatcacatcgtcaattaattttagttttttttgcttcatattaacttcctttcatatgaatatgttatcatatgtatgtaaaataaggttggggaggaaaagcgatgataaaagatattttaacaggtgtaactgcatatatatcaactagtatagactatttaatcgttttgatggtcgtatttgcgatggttcctaaaaataagcgtattttagtttactttggtgatattgttggtacaaccgttttagtttcagcaagtttaatgattgcattggttttaaagtccgtccccgacgaatggatactaggattgctgggattaataccaattgctatgggtatcaagttgatagttgcgggcgctgctgacgatgaagatgtgattcaaaagcaaatcaacaatcggcgcggcgtaatcttgaatgttgcttttattacgattgcgacttgtggagcggataatatcggaatatatgtcccaatatttacgcagttgagcgtagctagtttaatagttgttttactaacgtttgtagttatgatgaccttgtttgcgctattaggatatctattagtttgcctcccaacagtggcaaagatttttgatcgatggggaactttagtaaccattattgtttacattggattgggaatctatatcctctttgagagtggaacaattcaacattttattaatctgatataaagttaagcacagtctatgaactgtgctttttttaacactttaacgtaaaaatcattgagtattaggaagtaaaagcttactataaatggtataaatagtaattaaaaagtcttttggaggagtttttatgaataaaaaaagaatcactggtgcagctttagcaagtgcgcttttatttgcgcccttagctatccaaacttctacagcaatggccgatagtttttatacacaacaaaccaatgctgaacgtgccgatatcactaactgggtagctaacacaactgaagacattagtaataatattaatgctcaacatattgatactaacaatttgcatggaaataaatacgtaattcaatggggagacacactttctggtatttcagatgctacaggcatctccatggctaaattagcttatgataataatatacaaaatatcgacttaatctacgctggcgataccttagttctaaatcgtgatggtgaagtaccatcggattggcactattacggtgatggtgtttatgttgctaagaccaaggtaactatcaataacttcgttgataatagccataacacggtaaacattaatgtttcaccaataagtcatgaagaaggaagttcatctagtaaatcaaaagatgatagtaacgaatatatatctgatttagatccagatggtaagaagggtgaagcagctagtgatactgatagttcatcagattctaaatcaagttctaagaatcatcattcagattctaaatcagatagcgatgaaatggatgaaagtgacttctcatatgcagttagcaatgaagtatctagtaagttaggtttgaatgatggcaagctaactgtagacttcactggtaaagatgatgactccgattcagatgttaatactgatgatacaagtgacgactctgattcagatacagaagatgtttatgataataatcaaaatatttcaaccggtagtgataagcttacagatgaaaacgctgaaaaattagctgacaagattgttgcacaacttaaggctgatggtaagactaaagatatcgataaagcggataatgttgaattgatgattgaagctaacgatgatgactttagtttcaatgtaactttaacaactaccgatgattccgattcagatgaagacagcaatagtgatgatagtgatgctgatacagatagtgaaggtgcagattcagaagataccgatacagattcagaagacgtagactcaagttctgatgaaagctccgatgaagatactgactttgatgacgaatcagaagacactgatacagatactgaagatgaagatcaaaactcaagttctgaagacgaagatagtaataaccaagtcacaactaatgatgacgaaaatacagatactgaagaataattaaccgagaggaactttggctgatgaagaagaaatggacagttattgggatcatcgttgctgtgatcgtaatcgtatgtggcggtgtgtactggaatatgggacactccgtagctaaaaaaataccgggtaacacttatctttaccagagtgtttcaaaagataagactttatatgttacctttgctaagagtggtgatcgggccgtagttaattccgataaggctactgccctcaaggcaggtaagagtcaacaagattttgacaaagaatataaggctcaatctaagttaacttcttggaattataaagctgaaggtggaactttaactctggctcaagaaactaaagatggtaaaatttcacaatggcaatataacggaattttagcgacaagtaagaaatttactgcccacagttttacttatcaaattgctaaagctggccaaggtcaagtgaagagtaagacggtatttgaaaagattaattaacttaatttaagttaaatgaaactgcgctaaaaggtgataaaagtctccaaagaggatttcacctgatggtgcagtttttggttactctaagcctaaagtagtagattaattaggacatagcttgctggaaaattaaaaagttgctatgattaggttaaattaaaacggaaatcaccaccggatggtcaggcatttgtaaagctcattaggtcaatgaagagctttacggatgccttttttattttttaggaggaattgaagatgacatggttttatttagttttggcaggtatttttgaagtcgtatgggcaactactatgaagctcagcgaaggatttagtgttctaacatatggaatcgcgaccgcagtggggatgattatgagctttgtatttttatcattggcgattaaacagatgcctcttagtttagcttatccgatttggacgggaattggtgcagtgggttcaatcattgtcggcgtaatcttatttcatgatcaaattcctaatattacgtgggtttttattataatgttgattgttggaattataggaattaagatgactgcaggacattaaaacggcggaggatgtaggagtgcaaaaacctaaaatagttattgataatttaccagaggagtcattttttgagatttacaaggatgaagaccggatgctgataaatcatcaaattagaaatcaaaatgctgaaaagcaattccttgaacggggcatcatcgaacaatcttactttgaacacgttaagtttaatcaaagcgatttttatcggctagagttaaccgactcgatttttgttggctgtgatttttcaaactgtaaaatggaagaagcagttttttatcgatgtgaatttagaaattgcaagatgttagggatcaacttgaatggcgcaatttttaacaacgttctgttagatgggacgaatatgcagttagcagctctaaatcaaatgaaagttaaagatacaatgttcaatgcctgcaatctaaaagatagtagttttgctgaaaataaactacaaggagcagttcaatttgagcattgtgaaattgatcaaatgtccttttatgatacatcgctgaagcatgttaatctcagtacatgtttttttgaaaaaattgatgtagaagagcgtttaattagaggaatgcaagtcaatgctactcaagcggcccaaattgcgcaatatctattaggtttacgtgtagaatattaaaaaactacgactttaggtgattttcgaagtgaatttcgtacttcgaaggattcattaccttttgtcgtagtttatttgttattattattatgttcgtaagtaaccattttcttgtttaacagctaattgaccaactagatttaagtaattgaaaggttgatcaaagttcggagaaaatagcatatctataaaggataattcgtcaatcgtgccgtgataatgcattaaggctgagattgtatccgcagcttgagaaacatcatgtttgctccagagttgtactcccaaaaccttacgggagttacgatcgtaaactaattcgatttcaactttgtgagcattaggcataaagtctggacggtagctacctttatatgccactttagtagcgttaattccagcatccaaagccatggctaaggtcacaccactacaagccaaagtgcgtccgaagattagcattccagttgttgattgggtaccaattgaacggaggcgtttatctaacacattaataccaaccaaggccccttggcgaacggcttgtgatgctaatggcatgtaaacatcggtttgcaaaccattatgtttaactgaagcagcatctccagcagcaaagatatcagggttagatgtttccatataatcattaacgacgattgctccattagttagttgatctactttaccttgtaataaatcagcttgaggaagtaagccagtacaaattacagccatatctacttcaaacgcttcgtcggcggtttttacgattaaggtatcgtcagcgccatcttcgaaggatttaacaatcgtaccagttttgacctgaatgcctttatcttctaaaagattggtaattttgtcagcaatttcaggttcgatatgacggtctagtagagtctcttttttatggaaaagaataacctcgtggttagatttattgtaaccttcagctaattcaacaccaatatagccaccgccaataatagcgattcgttcatcattttgggcttcgttacataagtcacgagcttcttcataagtcttgcatagctttactttgggattttcaacgccttgaatagtaggaatagacgtgagtgaaccagtagccatgattaacttatcgaaagattcggtagtgaattctttagtctctaagtcttgagcaaagacggtatgttcttcgacattaatatcaattacatcgtggcgtagacgcatgtctatcccctgagcccggtagtagtcgggatcagcatacatcgcttcatcaagattagatattgtttttcctaatgttaagtaagtggcgcatgataagtatgaaattgtatcgtgtcgttcgaaaacagtaacgtccgcttgtgggtggtatttcaagatttcattgactgctgcaataccagcatgggtacaaccaacgacgattattttttctgtcatctgtaatgacacctttttttatggtatgaattatagtatttatatagtatactataacttaaacgttatacatagtatagtatatgattaatttttttaaattatcgaaggaggtattctaaatgcctaagtatcgtttttttgcgcaacaacaaattaatacagcaacgaatgccgttttaggatacgaactattaattaagaagctaactccagatggctggcgcctaccgagttcatttattgatattgatacaaaagtttttgctaacttattgatagaaacaactaaaatattaggccaaaaggttcgctattgttcagttaacgttaaccgtgaccaattaatgaatactgctattgcagaagcaatcatcgaaagtcaacgtcaactttatccaaccaagttaatcgttgaattaaccgaagatgttagtgaacgtgaatacacacctacagaaataaaagagcaacttgaacgctttgtcagcaaaggaatccaaatttcacttgatgacgtgggtacaggacacaatcagtttgaagatattgaagacttccttcccttagcttcagaaattaaatttgccgttcaaaactttaagtctacaattcaagatcctaaaatcaaacaaaaggtccgtttctggaacgcgattagttctgaatacaatattcatttggtattggaaggcaacgaagaccaagcagacaatcagctaagccaaagttttggtattagccgccgccaaggttatttcttcagtaaaccacaattactaagccttccaggcgataaataaaagtcaaaaaaactactaacctcaaaagttagtagttatttttttacaattttttgctctaagataagcttatataaaacggttcgaatagctatttctaattgagaaaatgacgcgacgggttcttctaaatggctgatttcatgattaaaacgcctaataaattggttgaagtatgtttcaatatcatctgtagctagcaattgtttgatagtatctagcgcaaaagcagttttaaaaatgctaatcatcataatagaagcaatgtggctagcgttatacttctttttagtagggcgcgtcacaatttccattttgacgtaactattgaccatggttttggtgattttagtacctaagattggtgtcaagtagcggttaacttcttgaatgacttggtccatgtataaatcaaggtctggaaagtctttaaattcaggcaaacgaagttgtttaaaatcctgtagccacttttgataagtttcttctgtcatcgataaatcctccagctagtatcatagcataaattttattcaaattgatatgcatttcgctttacgtagaatacgattctatgtataatgacaccaataactacataatacgaaatgagggataaaaatggtgcaaacacgaagaaatcagattatatacgaagtttggaatgctgtgacccatggtgtggccttttttggtagcttaggcttagttattttattgattgttaaagccgtcacgcaaaatttatcatccaccgctattaccagcttggttatttatggagcaaccttactaatgttatatttggcttcgacgttgtttcactgtttagcatttacgaaagccagacgagtttttcaaattttcgaccatagtaatatttttttgctaatcgcagggacttacacgccatattgtattatttttgtcggcggaactagtgggatattgatgttgagtatgatttgggcaatggcgttggcaggaatcatcactcatatttggagcaaaggtcgttttcaaaaggtggaaacaacgatttatgtgattatgggatggatgtgtttgttagcagggaaggcgctatatgctaacttatcaccaactggattttggttgctagtcgcaggaggcgtggtattcaccgtgggagcggtgatttatagctttccgcgcatcccgggactacatttgatttggcactttttcgtgatggcgggaacgatgctcatgtttggatcaatttatttgaatatataggaagtaatcagatcaaaacacaacaaaaagagatttcagtatcgactgaaatctcttttaaaatatactaattaatttagatataattgataggcaaaacgggttgtatcaacttcattttcgtcattgaagtcgataatgccacgatattcgaaaccattattagcaataactttttgcatacctttatttttggggtgggtatcaatacggagttcattgtagcctagttcggaactaattgtgaaaagtccggacatcattttttcagagagtcgttgaccgcggaatttagaagacatcgcaattcgatgaatagacatgtaagtatcttccggattacctctccaacttccttccaacatgtcatcgtaatttacgtctcgatcaggccataaagaagcagtggccgcaatttcaccgtcgaccattaaaacatagctaattttttgttcaatatctttttcaatatcttggttagtagggtagccaccttgccactgattaattccttgttccttaaggtaagctttggctgcatcaattatttctaaaatggctggcaagtcagccttagttgctttgcgcaagtaagatgttgtcataattattctccatttatttttttatcagaaatgctattttaacgtaaatgaaaagagttgtcattactttttatagatgaaaacgtattcgttatttctcaaaagatttttggaattaacctatgattaatttttaattaaaaatatgataatatagtaaatagcataaattttaggggtgtgaatatgaaaaaagttcggaattggagattgacgctggggtggcaaatcctgataggattgatcctaggagtggttttaggtgccgttttctaccataaccaagttgccattacggcgatgcaaaatattggaaccatgtttatccacttgattcaaatgattgttcttccaatcgttatatcctgcttaaccgtagggattgcgggaatgggtgacattggagaattgggtcgtgttgggttgaaaactttgatttattttgaaattctaaccaccattgctttagtagtcggaatgatttttgctaacgtttttcatccaggaacttatattgatatccatagtttgcaaagtacggatattagttcatacgtggaaactgcaaaacacgctaaagaaagcagtggcctatggtcaacgattatgaacattattccaactaatatctttagttcgttatctgaaggaaacatgatgcccatcattctattttcagttctttttggattaggaattacggcaattggtaaacaaggacaaatcttgattgatggccttactgctatccaagaagtaatgtttaagattaccaactggattatgcacctttctcctattggggtttgcgctctaattggggtaacaatcgctcaaatggggattgatgctctaaaaccattaggattgttcatcttgattgcctacgtggcgatggtattctttgtaattgtggtactgggaattgtggctaagattcaccacgtgaaattcttccagttgctaaaggtaatcaaaaatgaattgattttagcattttcaacagccagttcagaggctgcacttcctaaaattattgataaaatgcaaaaatatggtgttagccaaggaatcgtatccttcgttattccaactggatacacgttcaacctggacggatcagctatctatcaagcagttggggcactcttcttagcccaggcttatcatattaatttaagtattggacaacaaattacactgctagtagtattgatgattacttctaaagggatggctggtgttcctggtgcttcatttgtggttctcttagctactgtttctaccattggtgttccgatagctggtttaacgtttattgctggtgttgaccgcattattgatatgggtcgaactgcggttaacgtggtgggtaactcactagctgcaattatcatgggcaagtcggaaggcgagttcgatgaagagaagcatgcagagtatgtaaaaaatatttagagtatgaaataaaatacagcgaaaaaaggcgaccatgacattaatgtcgtggtcgccttttttcgctgtattttaactgccaagttcataagtaaagttgattaatcgactgccataacttggatggtggttaagttgtttaaccgttttttgtagaagttcaagtttatcggtgataatgccatcgactcccataaagttcaatctggccattgcatcgtcactattgacggtccaagcataaacttttcgaccagttaattcggcagttagtaaaaatgagttatttaaagttgaatattccatcgtgtaaaaatcggcgctagactgtggaactccaataaaattgaaaggcagaatatagcccacggttaattttggattaagttctttaagtttttcaacggcatcataatctaggctatggacttgatcatgattttttagaattctttgtccatatttagcattgaaacgctcaaccacttttggatcatcgtatttagtagttttaaattcaattagtaggggttgtttaaacttttcagcagcgtccatgtaatcatctaagctagctatcttagctgaacttccattttcatgcgcagttaatttggtgagttgctttaaagtcagttggtgcggcgctttatcaaccccggttaaatttttaagattttcatcatgcattaatacaaattgatggtccttagtttcatggatatcaatttcgatgaaatcaggatgtaatcgactagtattcttaagggattcaatggtattttgcaccccatttttagcgttaaccccgcgatgagaaatggtaatgggagtgtcactaaaaaatccagttagatacaacgaattaaatccaatgcccccgataacaagtaaaccagcaataattcgaatccaacgttggtttccgacgttgtagctaagttcttgaagctggtcgcttaatcgatgagtatgggcagtaaagcgctgatctccagccaggtattcagtcatgatcatcaaagagccagcacccgcggcaatgctcgaaagaaacataaaaaattcaatcaaaattaagtttacggaagcggcaagaaaggccactccggttggtgtcatacggtcgaaaagggtttgttcccctagtactaaaagctgcccagcaattattacaacaatggtggtggcaaagagtaatacaagtcgtaaaacaatcggcttaaagttaatcttagttatttgccaactctgttttaccgcagtatgggcgttccgtttacccaaaatgattaatggtagaactaggaataagcgaattccgagataaaaagtaaccacgtatagcaaaatcatcactaacaaaagtggacgattttcagttaaaaaataatcaactaggaaactaggaatcctaattttatttaataaaggtgtcgaaaaacctaatccaccaaaaggtaagattaaaatgcagtagattagtaagaaccaaacggaacgaaaaaaggtcttacggacacgttgaacggaaagccgtaagagtgaatcaatcgttaacttctttccataattaatttgcatggttcctaaaaatagaaatgtgacttgccaatagatggccacaattactgctagaattaaaagaattaaacctaaatctaaaacaggatgctggctaataatttcaattaaattggtattagagatgtaacgaactcttgccaaacgtagcattacgctcccaattagtgtaaaaattgggattaaaattccgtatacagcaactgtagaagcaataaaaagccaaatatagctaaaaatgtgtttaaaaatataacgataagttttcagagtactcgacatgattctcccctaagtaattttttgtgtgaatttgtccaaaataaaaggagctacaacaaagtctaatctaaatcggatcaaggttaaaacttagattaaacgtctttgtcgcaactcctaacagttatttttcagttgtggtaaaagctttagtctcagtattgtaaacatgaacatagatatgatcaccatattcttcaaagaaggtgttttcgtcgttggcactgggataaaagaaactttcattaccattaatatcaactttaattccgggcattggtgcttccacagtctctaaacgggttgttgtggttgataggtaggctgcgatatatttcttgattaattgaagttccatagttcctcctgattatagtacgtttttagtttgttcggtatgaataatgtagttattgatcagttctgatgaaacagcgggagttttcgacaagatggtctgagctactactgattgggagagttgctcctgataaaaatcattgggaataaattggctgatgctgagaatgacaaaggaaattccataagtaattactaaaccaaccaccgcgccagctagactatttacttgatggataactggtagccaagtaaccatttgcgataaacgccctactaaacgaataatgatccagccgatggacattagtagaataaaggcgacggaatgcatgactgttaaattagtaacttggttactagtccagcctccgaaagtagtagttaggaaagcagcaaagtcattggtaaaaactttagcaaaaataaaaacaacgatataacccagtgaatacaataattccaggatgagccctcggcgccagccgcgagcaatcgccataattaaaattaaaattattattaaagatagtagcattaagagctcctttacttaattagtagttgagtctgtgaacagattctcccgtatatcaatggacgagagaatcctaagtatctaaacactatagatgaaaaatcacttgttttcaagattgttgtacttcatttaacttcaatttaacctaaatatagccagtttaaacgggatttataaaagatttaaaagaactttacaattccggatgaaaagaagtagaattagttgtcagtttaaaatgattctaaattagaacaaggggatagtaagatggagaagaaacaaaaagctggaacactcgcacaaaaaatcaatatcatccgagctagcgtaatgggcgcaaatgacggcattttatctgttgcgggaattgttttaggggtagctggagccaccactaatagttttgccatatttatatctggaatttcggggatgttagccggaacggtttcgatggccatgggcgaatatgtatcggttaactcccaaaaagattcccaagaaaatgcggtcaaagttcagcgtcaagctttaaaagatgactatcaaaaagaattggattttgttgctgaaaaatatgcgaatgacgggattccaacagacctagcccagaaggctgcgttcgaaatgatggaaaaggatgctcttttgactacggtccgtgagcgatatggttttgatatgaataactttaccagtccttatatggcggccatttcctccatgatttcattttcattgggatccttgttgcccttgtttaccatcactttcgctaaacatagtattcgtgtgcctttaaccgttatttcggttgcgattgccttggcagttactggttatgcagcggcagtcattggtaaagcggttcgtagacgagcagttttgcgaaacgtcttggcaggtttaattacaatggcgatgacatacttaatcggttcgctatttgctagataagggggaaaataagcatgaagaaaaaagaaatcagtttagacaataaattaaacatgctacgggccggagtgctaggtgctaatgatggaattctaacggtggtcggtgttctttttagtgtaattgcagcaacgactaatccatttattattttcattgctggattatcggatcttttgtcctgtgctttttccatgtcagccggcgaatatgcttcagttagttcacaacgtgatactgaaaaagcggtagtgggtgaagaaaaattacgtttgcaaactgatccccaagctgaacaagaattaatcgcacgtttttatgtcgataagggtgttagtgaacaaacagctcatgaaatttcacaagctttaatgcaagaaaaaccactaaaaaccgcggttagtgtacgctacgatatggatattgaagattacttgaatccttggagtgcagctgtttcatcattgatttcagcagctttagggggcttcttcccgttagtagcgatgtcgatggcaccaacttcttttaaaatgcaagcaacgattatagcgaccgtcttttccgtagcactaactggttttttgagcgccaaattgggaaatgggatggcaaaaaaagctattattcgaaacgtgattgtgggaattatcacaatgtttatccattactacattggaaaattattttaaaatttttaagaaatcgttttcgagcttcatctatcaagcttttcttaatcattgaagccacaaatgtccgtctaacggcaataaaaagagtttgcgcatcgtgaacaatatgttacgataaccgtggttcaagattgaggaaaggaatgattttgatgagtaatgagatcaagagcccaaagaaacgtcgcaaattagtggaatacgctaatggacgatcattggaagaaataaatgggacagttaaggtgcctaagaatattggtttttggaaggcactgtttatgtattcgggtccgggagcattagttgctgttggttatatggaccctggtaattggtcaacatcaatcactgggggtcaaaacttccagtacatgctaatgtcgattatcttgatttcgagtttaatcgcgatgttgttacaatatatggcggctaaactgggaattgtgagtcaaatggacttagcgcaggcaattcgcgctagaacaagtaagtcattgggaattgtattatggattttaacggaattggcaattatggcgacggatatcgctgaagtaattggtgctgcaattgcgctgtatttgttgttccatattccgctagccattgcggttttcattaccgttttggatgtactgctattactgttattgactaagattggttttagaaaaattgaagccattgtggtgtgtttaatcatggttattttggtggttttcgtttaccaagttgctttatcaaatccaaattggggtgcggtatttagcggcttagtaccaactactaaagcatttgaaacttcaccaacaattggcggaatgactcctttaagtgggtcactaggaattattggtgcgacagttatgcctcataacttgtacttgcactcagcggtttcacaaacgcgtgaaattgatcataacgatgaagaagacgtagcaagaacgctacgcttctcaacttgggattcaaatattcagctatcattcgcatttatcgttaattcacttctattggtgatgggagttgccgtatttaagtccggcgctgtccaagatccatcattctttggtctattccatgcgttgaatgatacttcaactttgagtaacggaattttgattggagttgccaaaactggggtactttcgacattatttgcggtagctttgttggcttctggtcaaaattcaaccatcacgggaacgttaaccggccaggttatcatggaagggttcattcacatgcgaatgccactttgggcacggcgtttgattacccgtttgatttcagttgtaccagttttgatttgtgtcatgattaccagcggtaaaggtgatcttcaagaacacgaagccctaaatcagttgatgaataactctcaagtatttttggcttttgcattaccattctcaatgattccattgttgatgatgacggatagtcgcgttgaaatgggtgatcgatttaagaatagttgggcggtcaaaattttaggttggatttcggttattttcctaacctacctcaatatgactggtttaccaaattcaattacggccttctttggagctaatccaagtgctggtgaagtagagctggcgcacataattgcctatatgctagtggtagtagttctagcactcctagcttggacagtctttgaactccataaaggtaaccaacgttacgaattggaaatgcaaagtaaagcagaagctaaggaggaagcataatgacctttgatgttaagagaatattagttggtgtagatgattcggaagatgccgttttagcctttgattatgcaattaatctggctaaaaaatcgggttctgaattggtaatcgtatcagttttggaaagtgacgaaatgaatgtttttcaagcgctagataaggactttattcatagagaacgggccgaacttgaacaacatatcttaaaatatcagaaaaaggctcaggatgcgggagtccaaaatgtaaagggcgtcgttacggaaggcgatccgggcgagaccattgtggaagaagttattccagctgtccaacccgatttgttagtggttggcgcagagtctaaaaaagggttagcacgacattttggtagccaagcagcctacatggcgaagtatgctcccatcacggtaaccgtggttcgataatataaaaaatggatcaacgctttgattgcgttggtccattttattttgagttaaattatttaggtaccataacttgaacgaagccttgctctacgccaagtttgatggggagttggtcactaggatcaccatcaattcgagtttcaaccttcaagtgtgaatcaacggcagaaatttcaacttcctgagcggtaagttgatcaacatctttgatatctcgaaaacgtccagttaggaaataacttaggtaacctaaaagacgcatgaatgaaaaatgtttcaggataaccaagtgaatttttccatctgctggagatgcagatgtatcaaaattagtaaaaccacccactgagttggtagtggttgctaataggaaacgcgtgcgatagacgtggtcgccatccgcagtactaactttaatctggcaagatttcttagcaattaactggcgaattcctttactcaaataaattaaaggtccccattttttcttttcatcttgtccgacatggcgggccatatcagcaagggttccaagtgtaaggctactaatgatggcatggtcttcagtatgggccaaatccacagcgaggggatgaccattaagaatggtatcaaaagcagcctcctcatcttgaggaatttcgagggctttagcaaaattattgacggtaccaccaggaataattcccactttgactgattttttagccttaaggaaggctgaaaacacggtattaatggagccatctccgccaattgtaataactgtatccagttgagcaatatgatcaactacataatcgagcgcttcttgacgactagacgtggcctttaaggtggttgatcgcttcaatcgttcagccgcttgctgaaaacgttcagcgatggatttattatcattttttccagcatcttcattataaataacggtatatttaggcatcagagcctccttgttgagctaaatttttttgtaaagtatctaaaaataatcgatttaaattgggtaaatttcgatttttactccaaatgagtgtgttcgcttctgacatgtcaggattaagcgggcgggcgaccaaaccgcttgctggtgaaacgtccacaagttgatcatataaaagtgcaattgctgctcccgttttgactagtaaactaccattaaaagccaaattgaaagttcccacaaaattaagttgatcataaagggtgttactccatttttggaataagccgtgtttgtaagcctgacgtgaagtaattaaaggacgaccgactagatcaataggtcggattttttcctgttgggcgagcggttcatctgctcgcatgatggcgcaccaatgatttttagctggtaaaaccaaagtgttgtaattattaagggggcgatttcccataataatgccaaattctaaaatgcctgcatcgaggtcagctaagatgggttccgcatccgcactccgaagattaacacgaacatcggggtattgacgcatgatttgctgggctgcctccatgactggcataatccccacactttctcctgctccaatgtcgagcgtcccactaactacatcttgtttttgtaagttataagtagttttatcaactaaaccaataatttgtagcgcccgttctaataggtaatgaccttcctgcgtaagttgaatatggcgatgggcgcgagtgaataatttggtccctaattcatcttctaaatcagcaatttggcgtgataaagccggctgggacacgttaagtaaagtggccgctcgtgaaatgttttgttcctgagcaattaccacaaaatagcgtaagacacgaatatccataatattttcctttaattcataactaaaagttattgtttttgatgtttaataagtatttaacattatagtaacgatcccgtagactagagtcaatcaataaggttaggaagcggggtgagttaatgcaatccaaaatggatttgggaacagcggcctatgatggtgtcgaagaaatcgtagctaaaaaccaacggttggttcagcaattaaatactggagttcattcggcaaatgaagtacttagcattgtaagccaaatcactaacgagcgaattgatggttcgactgaaattcgattaccttttcaaaccgattttggtcgcaatctccacattggtaaaaaagttttcattaatagcggatcgatgtttgtggacttaggtggtatctatattggtgatcacgtcttgattggtccaaacgtaacgattgcttccgttaatcaccgtctagaacctagcgagcgccgtaatctagatttagactcggtttgtattcataataatgcttggttaggcgccaatgtgacggtaactcctggcgtaattattggtgaaaatgcagtagttgctgcgggcgccgtggttacccgcgatgttccacccaatgcggtagttgctggtattccagcacgcgtaattaaagtaatcaagaatactaaggaggatcaaaaataatgagtaataagaataaagtagtaatcatcatgggcgcttcgagtggaatcggagctgcgacagcagcaatgctagcgcaacaaggagctaagcttagcttggccgctcgtcgtctggatcgattacaagaaatccaagctcaatatcctgaggctgaaatcgaaattttcaaagccgatgtaaccaatgaagatgaagttcaagctgtaattgatggtacggttgctaaatttggtcggattgatgtgttatttaacaacgctggaattatgccagttaataatttaaatcaagttgctcaaaatgaatggcaacaaatgttagatattaatgttaaaggtgtgctaaatgggattggatcagctctacccatcatgcgaaaacaacaaagtggccatgtcattacaacttcttcggtattaggctatgaagttttaccgggttatgcggcttattcaggtactaagtatgcggtccgcgcgattatggaaggtcttcgccaagaagaacaccaaaataatattaaaactacggttattgctccaggtaccgtgaaaactgagctatttaactcaatcaataatgaaaaaattcgtaatgaattgaaggatgctcaaaaattaccgggagctgaaatgacgggacttaatccagaagaaattgctcaagcagtggcctttgtgattgacacctcagctaatatggctgttaatgaaatggtaattcgtcctacaggtcaaaccgtttaattaaaggagaaatgataatatgaatgtttttgaagaatcgtacaaattaagtaatggtgtaaaaatccctaagttagctttaggaacatgggaaattgatgatgatcaagttgctgacgctgtgcgcagcgcaattgaaatgggctatcgtcatatcgataccgcccaagcttatgctaatgaacgtggcgtaggtgaaggcgtacgtactgcaagtgttcctcgtgaagaaatttttgttaactcaaaaattgctgctgaaattaaaaattatgatgatgccaaaaagtctattgatgaaactttaaacaaaatgggtctagattatttggatatgatgattattcataacccccagccctgggcagaagtaaatcaatccgatgatcgtcattttgaaggtaaccttgaagtttggcgtgctcttgaagatgctatgcatgaaggtaagcttcgtgcaatcggtgtttctagcttccaaaaagaagacttggataatttaatcaaaaatagtgatactaagccaatggttaaccaaatcttatcgcatatagctgctacaccagtggatttgattaactactctcatgaaaatgggattgtggttgaagcattttcaccaatcgctcatggacaagcacttcgtagcgaagctattcaaaaaatggcggcaaaatataacgttagtgcaccacaattatcaatccgttacgattggcaattagatacggtagtacttcctaaaacttctaatccggaacacatgaaatcaaacgccgagcttgattttgtaatttctgatgaagatatggaaattttgaaacaagttaaaccgctagattacggggatgcaagtgtctttccagtctttggtggaaaaatgtaagagtaatatcaatttaatctaaaaaaataatctaaggttggtcctaaaagggatcattcttagattattttttattatgctgttttgggagtagcctgaacccagtttttaagtaggtagatgttaataattgaaacaacgatagtagtaaggattagataaataaacgatagatagaagttagcatcagacgtagcttgagatgaagcaaaaatcatggtaaaggagtttgttgctaaattacttattttacctaatccgtatacaagaacaatgattaaaacgactcgagaaatgcgttgaatatttattggtagaaaatcactaaaggtattcgttagtaagtgaactaaactgactgagcaccaaatgaaggttgggaaaatcaaaatgattccggcccctactgcatattctaaaaaactaccattattcatgattggaagaattttgacaaaactagtaggacccataatgaacgttagtagaactaccagaatttcaaagtaaatccaactaaaaaagtttgtaagtacattaccgatatatagcttagtttccgaaagcggtaaaagtcggtagaggggagccgtccaaacccgttcttgtttaactgctagaataacggccagtaccaatgaggccaatactccgaaactaaagctaaacattaaccagtcggttattctaagtccatgaattaaggtttggtagaaacaagtgactagggtaactagtagatagatgccaaagaccttatgaataagatttactcgggttttcaacattgttttcgttaattgtgagaaagtggtcatcttaaagctcctctctataaaaatcttcgtagtaagtttcaatatctttaccaagggtttcacgaatagtgtctgcggcttcttgtgcagccacatgttggtccttaataatgacgacttgatcgagcaggttagcaatatcaccgacatgatgatcgctgactaaaaccgtcgcattttcaggcttccattgaataatactggagatgatttttttgcgtgtcatactgtcaatcccgtcgaaaggttcatctaataggtacaaatcagtttgacgagcaagcgtaacagcaattactaacttgcggaaattccctttagaaagttgattaacgcgttggtcagggctcaagtttgttgatgattggacaggcaatttcaccttctatggtttctgctaagtctttaaaagatagcgggattgaagttggaattagtatgacagatccaattagttctcaacaaaaagtgactacagtgatttccattcaaggttctgaagatgaaatgagtattggcagtaaggtaatcgttaatattccaggaagtactgtacaaagtggtgttgagggcattaatttagtgggagctggattacaaggttttgatggtccgacaatcaccaaagttggggataattatcaattagtatatgttaaaaatagtgaatcggttgctggtggtgaacaagcgactatttcttggacttcacccggatggtatccaggagatgaaccaggagaagtagaatccactattaaatatgaagatgctcaagatactagtaaaaacgcctcagatagcactcagtcaaatactaaggggacacttagtccggctaagccagattttggtaaatggacaatgatggctaagactgatgatattccaaattacaaaggtgtagcattaatgaatcctagtaattcggcggtaaatgtttatgacctacctgtaaattacggtaacaagaaaatgagtaatgcaacagttaaagacgttttgccagcagatactcattttgtatatccaggtatatcagtgcaaacagatcttaaaactaccaataatattcgaatcttaaaactgaatggcagtggttttactaacgtcacagatcaatttgctggtgggattaaagtaaatggaagaaccttatcagtagattttggaaatgccatgaatgatggttctgcatacgtcgtggaatatgcggttgcaccggatgatggtcagacaccaacaacctatggggtgaaagcaaattctgcagaattgaattatatggattcagaaggtgattctaaacaagccaccgcttcgctgaatcaagcaattgatgataatagcaatgggtccttcaagtttacaaaagaagtaaaacaaactgaatatttgatgggatcaaaacatttagattacacaatcaaattaacaaataatcataactttttaattcctagtgggtcaataattgaagatgttttaccaatgggattggattatgtttcaactgataatagttctacagcagttgatgtaaaacctagtgtcgcagggcaaaatgtgcaatggactttaaatcaagacttagatacgggagagagtgcagtcgttcattttcgtgtaaaagtggatgaatcacaattccaaccaggagagaagattaataataaagccgtgttacatcgggtcgggagtaaggacattaatagtaatactacaactattttagtgtttaatggaaaaattaagatcagcaagacagatgccgaaactgaaacggcattagcgggggctgaatttgatatcctagatcaagatggaaaagtagttgaccatgtaaaaactagttctgatggggccattattagtaaaacattacccacaggggattactctgttaaagaaactaaagccccagaaggatacgaattatcagagaaagactatacagtacatctagattatcaacatgctaaaaatgggatagttgaagtcaatgttgaagatattccagataccacaagtacaacggatacaagtgatacgacagataccacaagtacgacggatacaagtgatacgacagataccacaagtacaacggatacaagtgatacgacagataccacaagtacgtctaatagtacaaagaattctgttcctaagttgccaggaaaaataacttctggttcttcgggaacaagtacgtcgaaaaaaggtaattctacaagtaaaaaatctagtggattaaaatcacctttagctagcctgctaccacaaacgggcgaaaagggtggatggattttaacgtttgtaggtgttgttatattaggagtagttggctggtttgtatttaagaaaaaacggtaagttttaggtactaaattaattgaaatgacactaagtttaaaaccgagcagatagctcggttttttagtaataaaagaggaaaaggattagaaaatatggtaaaaaagttgaaaaatggtagttggtacttaatgagctttattttacctataaccattgtcatcatagcttatgcttcaaacggaatatattggggtagcgcacatagtattctggcaagcgatgcttttacacaaggcgctaattttttagccagttttcgagaggttttacatggaaaaaatagcttgtggtttaattggcaagccggttttggattgaattatttagcattatatagttactatctaggagggatagtaacgcctttagtaggactatttagcaaaaatcagattccaaatgctttttatgtaattacaatatttaaaataggattagctggtctaagcagtttttcttatctaaaatatcaatttaaaatcaaacgataccaacaattattactcgcaattagttacgctaccatgtcttttggattagtaaatgcagaacaaataatgtggcttgatgttctctatatactaccactaatagtatggggagttgatcaatggatagaacagcaaagatggggattattgttcattagttggttcttaatgttagttactaatttttatattgcctttatggtgggattatttatcggaatatattatttaatgaggttaataacattaaaagtacaacaatggtggattaatattggacagtttattggaattatgctctggtcaacaattagcagtggagtaataattttacctgtaatcttatctttgagccgcaataaaatgccattatcatcaatgaatggtatcttcacagatcgctctggattatgggatttaccagttaaatctatgataggggcttatgatggtactaaatttgggactaccccttatatttatgtggggctaatagtcttaatttacgcagtatcttacttttttaatcggcagattgcacgacgtgttagggttggatacgcagtattattactaagtttgattagtggattctatctacaatttttcaatcttacttggcagggatggcattttccagcgatgtttctataccgttatagttttttatggtcatttgtaatgatgcaattagcagcgtatgaattggaagttatggtatctcgccttgaagcgaaaattggtattattttaggcagtgtgatgctggtggcgactgtggggagttttaatcattatcactttattagcatttggaatttagtagctaccttattatttttaatagtagaagtactactaatctttagcagattaaataaaaaagtagccataggaagtttagttttagttagcattttagagctaacgatcaatgcgggtttaatgtttaaaggggtagctacagaatggcattatccaagtgcttcactatttaatgagccagcaaaagcaatcaaagaagggcttccaaaaataaggaatgatagactgcgccgagtagaaaacctagattctatctcacgtgacgacggtttgaggtttaattatgggtcggctaatttcttttcctctgtaactaatcgaccatttgagcaaaacttaaatcaattaggttttcgttcaactggaagtaacctaaacatgacatatggaaataatactttggtaatggacagtattctaggtattcagacgaacttagcgttgcaacctgttgataaatatggttttcagatggcaactcgttcaggaaaattttatgtaagtaacaatcaaaatgctttaaaaaatggaattgtagtagagcaaaagcttgcggaaaataaaaaattgagtaaaacagataatttaggtaatcaaaaccaattattgtccttagtagctcatacatccgttacaaagcggttattcaagagctttccggttcaattgaccggctctacaggacaaactgctgaagctggacttgaatttaaaaatttagaaaatggtaatcaatctcttaaattatcagtgactgtcccaaaaaatcaacaagcctatttgagtttatttaaaatgcaaggaagtataagtcaaatatcagtttacaagggaaaacaattaattgagaactataatccaaatttggttgggcagtatattaatctaggatctttcaaacaaagaacgaatctcaatattagtgttcggctaagcggaacagggacagctcaatttgcacgcccaactttgattacattaaatgaaaaaattttccaacagcaaatagaactagctcggagatatcaagccacaaatttaaaatatgggaaacggacaatcaaagggaatatcactacaaataacgataaacaagctttattattaacgattccagcagatcctggttggaaagcaaaaattaatggcaagcaagtagcagttaaaacagtagataatttatttacactagttcccttaaattcaggaaaaaatcagttaactatgaaatatgtaccgactggtttagtgattggagcatggttaacaatacttggtctatcaagttttatttttgtacagatctggagacgatacgataatgaagatttaggttaagtattggtatttttatagtaagctatttaaaatagtgaaagtaaattaaaaaagtgacttattttagatttatctgaataggtcgcttttttagttggataaggcgtatcaagtgcttttttgggtaaaaaatgttttagtcttagttataaggaaaagagactatttccaaaatagtacttaaggagagattcgttatgtatgaagacttacaaggaaaaatagctgtaattacgggtggttccaaaggtattggctcagccatcgctaaacgttttggtcaagaaaaaatgaaagtggtcattaactacaatagtgatccagacggagctcaaaaggccgccgacgaagtaattagtgctggtggcgaggccgtgacggttcaagctaacatcgctacagaagccggcgttaatcaattacttgaaacggcgcttgaaaaatttggtgacctagatgtctgggttaataatgctgggatggaaattaaatcaccaactcatgaagtatcgttagaagattggaataaagtaacggcaattgaccaaactggtgtatttttaggttcacgtactgctttagcctactttaagaagaaccacaaaaagggaaacattattaacatgtcttccgtgcatgaacaaattccttggcctacctttgctagctatgcagcagctaagggaagcgtaaaattgttcactcaaacgattgcgatggaatacgccaaggataatattcgcgtaaatgccattggacccggagcgattaatactcccatcaatgccgaaaaatttgctgataaggaacaatatgatcaaacagtcagcatggtacccatggaccggattggtaaacctgaagaagtagctgcgggtgcagcatggttagcatctgacgaatccagttatgtaactggtattacactatttattgatggtggaatgacgctttatccagctttcaaggatggacaaggttaagaatcacattggggtaaataaaaaagaccgcgaacggtcttgaaaataataaatattgatgtttaatcatcgcaagaatttggccgccattaattttgcggccaaattttattaatctcttttaaaagtggttggacgagcttacggttactttttaaatatgaaccgtagaattcaagacgattacgaggatcgtcgatggggacggctacgcgtccaccatcgtcagagcgctcaatggtggccgaactaactagtgataagttggagaaaaaataggggaatttagaattccgactaatttcactcatggcatcgagatcagcttggtataagaaagcagcatcagggatattattttctacgattgcttgccaagggccagtatcttggaccacgaggaaactcattccggctaaatcgtcgaagtttacggatgtttttttagatagtggattagatttaccaatttctactccaaggtattccacacccaaataaactgattcgatttcatcggtcataatttcttggttggtaaaaattagcttctctttaagatttttaagattatcagcaactttttcaggaaaaacattttgaaaattaattttaactttagcaggggatgaaatttcggagttttctagtaggataactggaccaggagcaactgaaccaattacaatttcatgatttaagtgatggtagtttaatactcgttcagtaaaatcccgctctgctttcaataatttggctgcttctgtagccgcgtaaacaccagtttcatttaatttgatgtggttactaactcggcgatcaaaaagtgatacacctaattcatcttctaatctgcgcattccccgagtaacggtgggttgagtaatcattaaatgctcagcagtcgagcttagtgtaccgtatctttgaaatgctactagctcttttagtaaatcaaggttcattgccaattcgattacttcctttcactattccataaatgcatagtaacatacttgattggtaatttttatatggtaattaacctcctatactagaaagtacttaaagatagtgtaaataaataggatatataaatttaaaggggtacaaagttatggaatatgtaaagttaaatgatggcaaccaaatgcctcaacttggatttggtgttttccaagtttccgatttgagccaagccgaacaagcagtgagcgatgcactcgatacaggttatcgtctaattgatacggccgctgcttatggcaacgaagaggcggtgggtgccgcgatcaagaagagcgggattaatcgcagtgaaatctttgtgacttctaagctttgggtggatcacttcacctatgaaaaagcgcaacaaggaattgaagattcactaaataaattaggattggactatattgatttatacttgcttcaccaaccttatggtgacacagcaggtgcatggcgagctttgattgaagctcaaaaggcgggtaaaattaagtcaatcggtgtatctaattttgctccagatcaattgatgaatctggaattaatgtcagatgttaagccagcacttaatcaaatcgaagtttcaccttggtaccaagaaggcgaagcggttgattttgctcaaagtcaagatgttcaagttgaagcatgggctccctttgcggaaggtaagcataatattttctcaaatgaaacgatcgctgaaattggtcagaaatatggaaaagcgaacggacaagtcatcctacgttggctcctccaacgcggaattgtggtaatccccaagtcagttcataagacacgcatggctgaaaacttagatgtttttgattttgaattgagtgatgatgatatgcaaaagatgagtagtttagataaaaacgaaagtcagttctttgatcaccgtgatccagaagccattgtaagtatttttggtgaaagcttaaaagcattacgtaaataattttaggaggaatttaacagatgaaagcagcagtatttattgaaccaggtaaagttgaagttaaagaagtacctaaaccccaaattgatggtgataaccaggcaattattcggattgtacgggctagtgtttgtggttcagacttatggtggtatcgtggaatttctgaacgtcagacagatacttttatcggacatgaagccattggggttgtggaagaaactagtgcagacgttgataacattcaagttggcgacttcgtggtcgtgccgtttacgcatggatgtggtcattgtgtagcttgtttgaatggttttgaaggagattgtttgaatcgtaaatccggcgataacggtggctaccaggctgaatacatgaagtatgaaccagctaattcaggattggttaaaattccgggtaaaccagaagattataccgatgcgcaattagcttcattccaaactctttctgatgttatggcaactggctatcatgctgcccaaaatgctgaagttaagccgggctcaacagtcgctgtcatcggagatggagccgttggattatgtggagtgatcggggctaagttgcttggagcaagcaagattatccttttgagtcaccatgaagaccgtgctgagttaggtaaggcctttggtgccactgatatcgtagatacacgtggcgatgaagctatccaagatgttttgaagttaacgaaggaaaatgccggagcggacgcaattttagaatgtgtgggtgctactagtgcaatcgaacaagcaggtcaaattgctcgcccaggcgccgtaattggaagagtaggggttcctcaatcagaacctaaatctaaccaattattctggaagaacgtgggtcttcgtggcgggattgcttcagttacaaaacctgataaagaagttcttttgcaagctgttttagatggtgaaatcaaccctggtcaagtctttacaaagagttttgatctagatcatatagaagatgcatacgaggcaatgagtaatcgtcaagctatcaaagcattgctggtaatttcagataaataaaagcatttctatagcttgcttaacattgttagctcaaaaggtgattatacaaagttcaatagaacggtggaaagagcttctagttggtagctctcgtttctgaaataacgcctacaattaactacattatccaagtggaaatgatatttggtttcgttaatatctctagtcaatttcagtattggagtaagagtgttcaattttgatttagatgatgttttaatacttgaaactgctaaaatcccacatcgactaaatctatttaccaaaagtggtaaatatgaattttacggaaggctccaagactacgaaaagaaatacaccgagctttttcgttgttccagatcagctttaattaatataaaaaatatatcggaatacaatgcttcaacaaagatgatttattttgattcatcactaagctgcaagtgttcaataaccaagacacgagaactaaaacgacgtatactagcttacaaataagagaaaaaatttttcttaagttgttcaaatgagaattcataattatacaaaattgattaatgtagtataaaaaggaatccattactcactcagtgatggattcctttttatactttgtaccttgtttccacgaaattagcaggtactatatataattttgctattattcctgatttattttgctaattattttatgaagttgtttatattggctaagcatccatgatttataagtttttcccttgggcagggtttctgtgacagggagtataggaatatcatttttctttgctaacttgaccaaattattaactacctttgaatctacctgtttattgaaaacgaatagcgaaatatcatgttctttaatatttttttgtaactttttaatagtagctggagatgggtcgacaccgttttctatatccttttcaaaatcagcatccgctactgtaaatccaacagcttttaaggcataatcgaaaactggttcactcacgtaagcatttttattcttagtattattagtaatttttttgatacttttgatttgctgattaactgaatttaaagacttaatatatttttttgcgttaactttaaaatattttttattttgaggttgtaatttaccaaactgttttgctaaatcgttagcaagatgaggcatagtttgtggattgtaccataaatgtggattgtcaccttctcgtttatttaaaagatcttccccaactttaatataagtagctttatgtgcattttgggctaacttatccatccaaccgtcataaccaactccatttgcgattaatacatcagaattggttacctttttcgctattttagaagttggttcataatcgtgagggtcaacattgggatcattgatggcagatgtcacttttcctttgttaccgaccacagctttcgctacttcaccataaaaatcggtggttgtggtaatttttatttttccatctttagtagacgaattattttgagaacagccagccattagtattaaggtactggtaaaagcgaatactagcgttacaaattttattaattttttcatatctactcctaaatataataatgtatgccaaataaatctataaaagtactatcttttattagtcctattttttttaatttctttaataatttttagagctcttcttttagttttgacgttagggctttttaagtacctataagcacttgattgattttctttcttcatgtttttctccttaataaagtgatctatggtcaactgctttatgtatttctgaaatttgcatcaaaagcatatttatgaaaattcaaaataaatactaaaagacttatacaacttatgcgtaattcttcatatcgctaaataaatgataaaaatttacattattagatcacctcctaatctaaatagtaatcattactatttagattaggatattaacatttaattgtcaaatttttttgctaattgtggctacatttattaaacaactacaaacttagaactttgagaggatcacagtgtcagaaattactaaaataactaatatataagctttttatgggagtttttgatttaatggtgatttaaatttttctataattcttatttttggcttaaatctaacggcataagtacttcattagtcctcctcgacatgtacgaacgtacgttctataattaaagtgttcttaacatgcgaaagaaaaaaagacctttgacatagcaacattaaaaatatttttctacatcgtaaaaaatgtttttaaaaagtagcttttgtttcaaaagttaataagggagtagtttacatggaaaaaaatttgtcggaacacagtgaaaaatcggtacgtttttttgatttaatgatggagggtttaaaagaccacgttgatgccgaaactttttgggatgcagtggatgaaaacgcagtatttaagtttaattactattttcctaatttgccaaaggaaatgggcaaattaaaatataaagagtggcttgaagagaatactaattcaggatcttccgctgagtttattaatttgtataaggatctctcaacacctggtcaaacgactattatcatgcaatacgttgtgcgctttaaaccaggtatacctgatatgaatttcttgtcaattgctactgttaaggataataaagtagttgcgtgggatgattatctggatacttcaaaataggtagaattaaaattaatttcgtaataattaagataaaataaaaagagcatcactactaaaacgcggtggtgttctttttggatgattatttctagtttaaaactaataacataagtgccccatcataatatttatggtcaattttaaaaaaattttcatatagtccatattctttaaatccaaattttttatataaatgaattgcaggtatattatctgttctaacttctaactctaaaatttctaagttaatagactttgcataatttattatttctgctagtaacatgctgccgatgccttgaccactaaattcttttaagactgatatgccaaaggtccctctatgactaattcgctttcttaaaaatgatttcatgttagctgtacctattattttttcatctttagtagctaacaaaaaaagattttcggaggacttggatgattcttctaaaagatttatctcatcagtaagcttcttttgagccatttcttctggtgttaacaatagattattggtttcattagtaataaattttaaataattcagtacatcttgagcatcttcagattgcgcttctctaataatcacctttgtagaagtcatttcatttcccttatttctttttaaatattatatacccgtttcattttttgcgttacatgatatttatactcttttgcgaacctgatttgtatagtaaaaattgaaataaattctactaataaaaatagaacagttctgaccagaaataaggcatgaataagcagtataattgagataaagcaatatagatatcatgattgaattacattgaggggaatgataaatcaatatgagaaaattgagtcataaacaaagcttgatggtgattattgcgattgcacttttggcggtaatcttacaattcgtcttgggtcaagcttggttagcccaaattctggtttccttggtgggagccgtgatggcgatgaccatgtttattgagatgattgggactttgagatcgggtaaatatggggtcgatttattagctattttagcggtggtttcgagccttttatttagtgagtactgggcagccatggtgattttagttatgttaactggtggggatgccttagaagactatgcttccaagaaagccaatactgaactcaaagcccttttagataattcaccgcaagtggctcatcggctccatggtgaaaaactagaagatattgctgttaatcaagtacaagtagatgataagttggtgattaaacctggggaattagttccggttgatgggtttatcgttgaaggaagttcaaactttgatgaatcttctttaacaggagaatcacagccagtaaataaggactttaacgatgaactcatgtctggttcagtcaatggtgatgctgtggtaaccatgcaagctagtcaggtggccgccaatagtaagtatcaacaattaattaagttggttaagaaagccgaagcaaccccggcccgttttgtgcggatggcagaccgttatgcggtaccttttaccatcgtggcaatcgcgattgcggtggtggccgcggtaatttctaagagtcctagccgaatcgcgcaagttttggtggtggcttcgccttgtcctttaatcttagcggctccggtagcgatggtttcagggatgagtcgggcttctcgcaatgggatcgtggttaagacgggggatgttttagaaaaattatctacggctaaaacggtcgcctttgataagactggaacattaactaatgggcatttgatggtggcggagattttgccacatcaagaagtttcccaaacagaattgctccaaatcgctgctagtgtggaaactatctcctcgcatgtattggcgcgctccttagtaacttacgcgatagataaaggtctggaaatgttaagtgttagtgacgctcaggaaattacggcgaatggagtacaggccttgattcaaggaaaattagtcaaggttggtaagcgtaaatttgtaacgggagatcctttaatcccgagtcaaacccataccgctatctatgtcagtcgggatgatcaatacttaggttgcatcacgtttaccgactacctcagaccagaagctagccagaccatggttcagttgcatcacttaggcgttaagaaattaatgatgttaagtggtgaccaagtcaaaacagctcaaaaaatcggtcaggaagttggaattgatgatgtccaagctgaattgctaccagaagataaaattgctgcattaaaagctctcactccggaagaaaaaccggtagtgatggtcggggacggtgttaacgacgctcctagcttggtaactgccgatgtaggaattgccatgggagctcatggatcgtctgctgccagtgaatcggcggatttggttatcttaaaagatgacctagctaaggtagctaaagcagttgtaatcgcaaaagataccatccgagttgctcggcaagccgttttaatcgggatttttatctgtacagcgttaatgttgatcgccgcttttggaattattccggcatttattggagcgatgttccaagaagtgattgatacagtttcaattttatgggcgttgagggcacgttattctaatgaaaaataagataagttataagaagtaggaaagtatactattttcgaacctatagagagcactttaatacccgagtcgttaaagcataatccaagcatttaaatatattctacactatcctgtataataatctttgtatattaacatctgctttaaatttttttgtcggcatgaatgtagcactaaggatgaggatatgtccttttttgcgcaaaaaaagtgttgatagacaattttattatccagcaacactagttattgtagaactcttttttgcgtatatcatttataattaaacaattaatttcagtctgacgaattcaatattctacgtcttcttattcataataaatactatgtgagttgattttttaatacttgaaataaaagtagctctttttagttctttaaccattatcttgcaatagcggcttaacaaacgctgaaaaaagaatatacccaacaatgactccgcaagcattagtgatgacatcagtaatatcaacggttctttgaatgttgatcaatacgtcgagtactaactgcatcccttcattgaacaagccggtcattccagccgctatcactacgaggaaccaattcagatgtttatggaaaaggattcctagataaactcctgctggaatcgtcatcacgatgttcatgaatgaacccatcgaacgtaaggctgacggaatgtaaatgattttagcatggtgccaatagaagtagcgcacatcatagtagtaggggtcgatgaaatatcgtcctggtgtaaacaataaccatgccacacatactagataaattgctagacttccatatacaatcgctcttttaacacttggacgtcgctcaaatgccactaaacaaccaatcacgatcaacagggagagaccgagaaacggtagatatttaattacgaacataagtagtctcctccttaaagatttaccatctatcttatgatgatttgcgcttggttacaaggtaaaccggaattcctaataaagttataactattccggtggtagccaatattggttggtcaataatcgtcgtgactaagacgaaaattccacccagaatggcaaccactggtaaaaatggatagagggggactttatatggtcgcactaaatctggttgcgtgcgacgtagcttaatgaccgcatagaaaatcaaaacgttaaagatccacatgacaaagattaacatgtcggtcaacaggtcaaaggaaccaacaatcatcattagtccagcgattactaattggacgattccagccacgtaagggaccgctgtgcgtgataatttacttagatgattactcattggcagagaatcttctttagccatggcgtaggggatgcgcattccggtcatcgtataaccattcaaagctccataaacggagatcaagattccaatggtcactagttttccaccgatgttaccaaagagctgtcccgcagcggtagaagctgcattcagattgcccgctaaatcgctgatcgggagggtcttcaaaaagactagattaatgccaagatagacgatcatgatgccagttagtcccaaaccaatggcaaggggcaagtctcgtttaggattcttcatttctccagcaattgcgccaattcctaaccaaccatcataggcaaaaagggttgatagcaatccgccactaaaaccggttaaagtttgagaagtcgtaaaatgttccggaatcaagctaagatggacattgcttggagcaaaaagcccgaaggcaataatcaccgcaatcggaattaacttggcaatcaaggccaccgattggagacgtgcaccgtgcttggtacctagtaaattaattcccgtaattgatgccccacagatgaccgcaattggtaagattagcccagctttcaaatgaaagaggttggtaaattgcgttccaaaaataatggaaagggcagcaatgttagcggggaagtaaattaaggtctgcgcccagcctaatagaaaaccggttagtttcccataagtgacttcgaggtatttaatggcaccaccggtaaccggaatcgccgaagctaattcggcactggtcagtccggcacaaatcgttagtagaccaccagctagccaagctaacaggcttagccccgcggattgcgtgctagctgttacactagaaaccttgaaaaagactcccgctccaatcaccgtccccatcacggtcgaaaaggctgcaaagagcccgatgttcttttgcaggtgagtatgttcgtttttattcataaattctttcctctgtatgctttaagacttattttactattataaataattttgctcaggagtggtaattatctaacaaataaatcacccttctagctggaaggtgattttaatatttagcgatcatggcttgtagttgctttaagtagctgttcttgagctgttcgggtgcttcaatcgtcaggtgtttaccaaaggaaactaggtagtgggtcatataggccagttcggcttgattgtagccacctacgatgtaaggcacaccatcaatcatttctaagtgcatgttggggtaactgtgttttaagaaaagctctttaccaaagggcgttaaccggcatttgaatggaatgttatggtaggtactttcatactggtcttgtaaagctttgagttccgccagcgttaaggtaggggccttagtcggatttatttttaaatcatgcatataatcacaccggtaagtaccccaacgctgggtgtctggattatacgcactcgtaaaccaaattccattacgatagaagagttcatagatttggagctgaatgtggacgtcctcatattgcgtgtaatgaatttggatgacttgttcttctaagatggcattcagaatgatttcaaggttggcgatgtcaccaacgggagccacgttatgatagtggacgaccgcaagcaggttggaaatatcctgctgattttccggaaacattgtcgcaaatagtttttgttgaatccgagcataagattcgtcaaaaggggtgacagaaagtactcgcaaagccttcaaggcaaagaagatggcttggacttccttcttattaaaataaattgggatgaggttggattgattcaataagcgataacctccattgcgtcccggttcggtatagtaggctaggcccatcgcttctaattcttgaatatcgcgtaaggccgtgcgtttagatatgtcaaattcagtgatgagatcctttagttgaaaggaatacttgtctctgagaaagattaattcttggtttaaacgttctgattttttcaattgctaatctcctatttaaaaggtgccatgttttggcgcctttttattatatactcgttttaacgaagtgaaaagggagattttaaagatgaaaacattgattattaacacccatccaaattttactaacgaggaacattactccattaaactccagaaattatttatggagaaattccaggagcattttactgctgaacaactaacacttttaaacctttatgatatcgaggtccctcgtattgaaaaaggccaactcatggatgtttggcaaaaacaaattgcaagagagccactatcagctacggaacaagcagttgccgatcaatcagcgcacttactggctcaattcaaggaacatcaccggattgtaattgtggcaccactccataactttaatgtcacatcccgcatgaaagactacatggataatattatgattgcccgagaaacctttaaatacaccgaagacggatccgtgggattgatgaccgatgattatcgggtgctattactccaagctagtggctccatctatacaaaccatgatcgttatacgcctttggaattttctcatttctatctccaaaaaatgtttgaagaaatcatgggctttgaccaattttcaattgtgcgggcccaaggaacgtccgtcattactcctcaagccgtttgggccaatgttccagccgatatgcaaaaagcttttgatcaattctacgctgactaactagtaataggctaccgagttaaatcgattcgaatattggattagattagagtacaatattcaaaaaggaggtagcccatggagcgtaaaagacatgctaagtatcggcctaaatttaatatgcgatttgtccatcaccgtcgacgaataattttaggagcttttctgctcgtggtgctactagccatggctggcgtctgggtagttaaaaaccaacaacgcggggcgcggttggcgctagcgccgtatcctgttcatggctgtgtgattgatcaggaaaatggcattatcgattttaattccttacaaaagcagcacatttcatttgtgtatctcaatgcgacgaccggggcgacttactttgacgatagttttaatacaaattatagtcgaattcaatcgactgatcttaaagttggtattgtgcataactttagtttccaaaagcgtcccaaagcccaactgcgttttattagtcaaaaggtcaagagtaatacgggacagctgcccgtggtgattcgagtcagttactatggggattatgatgctaagcgggttgattggaaaaaggcaggtccaaatttagctgacttggttaaattgctagctaattactatggacaggcggttgtgattaagacgacgcctgccattaaacgacaactggatcctacttacattaaacaaagtaagttttggctagaagaaccccagattaaaaagcacaatcggcgggttcaatttgtcgaatacgatgcggaacaaaaatttaaaaataatcatagtgatttggaacttcccgtctcctattttaatggttcacaaaagacttggaatgaacagactaactaaaaagagttgtaggtaaccgaacggggttactcacaactctttattttttttagattcaataatggcataggtttcgttattcgcttcgtcataaatgctgatgggacgataatcattcgctttaattattaaatgatagccaaaacggtcgataaaggtaattccataatcatctagagcttccacgacggtcttgagcaatttgccatccaaatagacatcatagttaggacggatgtctaattcatgctcccaattagtagtttgatcgtgatacaaccatgtcccagcaaagaaaaatggactcacgcctttaggatccttagccggtttttttgaatcaagtccaatgaatgaaaatagttcaccgaacgcatttttttgccagttcatcgcttcaactccctctctcaattttccgtttaaatataccattaattaaaccggggaagtagtgaaaagactctgtttttaggagttgttaataaaatgaattaaagtgaaataattccgtaatactgtagttttaaggtaaaatagaagtatgaaattaaaaggaggaactaccatgattaaatttggaattattggtactaattggattacacaacaatacgttgacgctgctcacgctaccaacgaatggaagctagttggggtatattcacggaccattgaaaaagcaaaatcatttggtgaaaagaatggtgctactaagttctatgatcagattgaagacttagctaacgaccccgaaattgatgccgtttacattgcttcgccaaacagtttgcattttcaacaagcccaacaagtcttggcagcggacaaagctgcggtagtagaaaagccaatcgtcgctaatccaacggaatgggaagaactctatcaaactctagaagcccatccaaaagctcgtttatttgaagcggctcggcacttacatgaacctaatttccaagccattcaaaaacaagtcggtgagttggaattaatccaaggtgctacgttaacctatgctaaatattccagccgttatgatagctacctcgctggcaacgaaccaaacattttctcattgaaatttgctggtggagctctccaagacttaggtgtttaccttgcgtacgatgcagtagcttggtttgggatgccggaagaagtggcttacttcgcccagaagttgcggacaggagctgatggtaagggcgttgccatcctacgctatcccgaatttgatgtaactttaaatattgggaagaacgttaattcagaacttgcgtctgaaatctatggcgttaaggacagcatcgtcatggataatgcggctgagctcaatcaagttgaatatattgacgctcaaggtcaacgaacggtgattagtgaaacaccagatgacaatccaatgattgcagaagcacgtgactttgcacgcgttattaatgatccggaaaatgaaaaaaacgccaccgattatcaaaattggctagaaataagtcgaaatgtaaataaactactatataatctccgtcaaaatggtaagatatattttaccaatgaaaaagaagaggactaaacattaatgaatgatttatttaaaaagcattttaacgaaaagggttttgcagaaccgactttgattcaacaaaaagtcgctgaaccccttcgaaatggggaatcggtgctcgggctatcacccactggttcgggaaagaccctcgcatttgccttgccgttgatggaaaaaatcacgcctggcgatggaactaaattattagtactatctccatcacaagaacttgccattcagacgacggatgttttccgcgaatgggcagctttgattggacttcgggtcacttcgattacagggggtgccaacgtccaacgtcaaatcgaacgcttgaagaagaaaccggaaatcgtggtcggtactcctggtcgagttttaacgttgatcaacgaacgtcgcttaaaagtgagtgaaattcaaagcttggtcattgatgaagccgatgaactcctaactggtgaaaaccttgaaggaacccgccaaattgaagatcaactcctagctgatgtgcaattaagtttcttctccgctactaacgatttagcgctagatgatttggaagcttggtttgatgtgcatccacaagtggtagacgtccgtgctgaagacaacactcgcggtcacgttcaacatggttggattgaagtgcctgaaaagatgaaagcacgtattttaaaacgacttagtcgagttaaaaacttccaaggtctggtcttttttaaccacgtttcgacgatggaaaagacagcggctttattgaagcatgaaggcgtagatgtcggcaaaattgcgggacatcaagtccaaattgatcgtgcagcagccatgcgacgttttaagaaaaaggaattgtcactattaatggtaactgatgtagcggctcgaggcttagacatcgatcgtttaccagcggtgattaactacgatattcctcacaacgctactacctatacgcatcgcgtggggcggactggtcggatggggcaagatgggtatgtcatcagtctgggaaatgatcatgatattcgggacttacgaaagatgataaaggaattgggaattgaggctgaaaaattagccatccaaaaccggaaaattattttggctagtgaatacgttgaagcacctaaagcaccatcgatcaaggctacttcaaccaaaaaatcagctcctgaacaaaaatcacaagctggagctaagactcctaaaaactctaaagcaaagagtcaaaagcaatttgataaccctcccgcaacccccaagaagaagggtaaaaagaaacattctaagcgtaaaggaatgcggcgcgttaagaaagagttataaatttattgaattttggttaattatattttttatagttaaaaaaaggcttaaatagtgtaatatagtcactgttgaaaggtgggtatatttttatgcgtagagaacatacaaaaaaatcgcatactgtgcgaaacacgattttaatcgttctggcagttattttacttggaggaggggtctacggttttcggaagtatcaaaatgtgaaaaatgccgtggataatacctatagtagtgcaggaattaaaaaacaacgtaatacaaatagtttgttaaatggtaagaagcccatttcgattttattaatgggaactgacacgggggctttaggtcgttcatataaaggacggacggatagtatgatggtggtaaccattaatccgaagactaaaaagaccacgattactagtattccgcgtgatttaggtgttactattccaggttatgaatcgaagtcaccttctaagatcaatgctgcttacgcctttggtcaagctggaacggcgattaaaactgtccaacaagtgttcaacgttccgattgatttctatgttttagttaacatgggcggtatggaaaaagttgttgacgaagctggtggagtagatatcacgccaactttgagctttacgtatgatggatatacctttactaaaggggttaaaacccatatgaacgggaagaaagccttggcttattcaagaatgcgctacgatgatcctcaaaatgactatggacgtcagactagacaacgagcagtgttaactgctatcatcagcaagagcagttctgtatcaagcttattaaacaaagattttattgattcaatttctaatgaaactaagaccgactttacctttaacgatctagtcgacttggctaaaaactatcgttcatcaaccggtagcattgaagaaacccatgctcaaggggatggacagatggctaatggtcaatccatggaaattgtttcaaacaccgaattacaacgggtaactaactttattcgcaatggattaagtttagaacacgaaaagacgggcaccgcagccttgtcaacaagcagtgctaacactagtgatagtagtgtggaagcagctaatatcaatgcaggaaattaaggaaaactaaggagatagaatcatggcagcagagtcagaagcagtaaaagaagaaaaaaaaacatttgatgttggtgacgaagttaccgtagcaaagaccgatttactaccaactggtttcgaaggaaccgttggtaaagtttatgaaaactcaattttaattgaaattgatccaaacagcgtttctaacccacgctcggaggagttgcatgaccttcacgggcgggtagtcgttcggatgagtgaagctaagaaaaaatagggttaggaaaactctaaaatttggcgtaacttaaccgccaattttagagttttttgttaagatgtattatttttgtaagcaaaaaagggttgtttatgataaaatacatgaagttagattgtgtacaataaaaatactacattaaagacgtataaggaattatctgtacattattaagtttatctaaacttaacgatgtatgaggcttttgataagtattttatagttgcttttgctattataaatattgtaagcatatccaacggtatattgtaatattattgatagagaaaaggggaatgacaatgtcaaaaaagattgatcttaactctgatgaactgattggcagtcgcgaagctagcttgatgtggggcaagcaaaaggattatgttcgcacaatttataacaaatatccaaagcgctttccggaaggcaccatccgtaagttcggtaagcagttagttgtaactcgtgatggtatggaaaaagtcacaggagttaaatacgaagaactaaaagaagaagacatcaacaaagctaaagaaaacaaataattttttgacttagagtacaggtagctggatttgacttctaatttagaggtcgacgccgactacatcgatagaaattaggaaattcttttttacagtcctaaccgaaaagccatttgatccaatgttgttgggctagatggctttttggtttaatttgatataaaaaatcactcaatctaattaagattgggtgattttttgttttggttcgcatatgattaacgaatcccagtattatcaacacttctgtctgtattcaaatgtccccggcgagaatcgaactcgcaacctatcgcttaggaggcgattgctctatccagttgagccacggagacttaactagtttattttcgcacgattttttaacgatgtaaagcagtggatgagcctttttataacgttttatgggttatctttcgttaaaattgaattgatacggtctttttaggactttgattgtgctgatacaaagaagaaaacgaacattaaacgcttgttttatatttaaagttagtgtatattattttgtggtgacaaaagtacaccaaatttatgcacttcgaggggacaaaaatgaaagtatttgactatgaagacatccaattaattccagcaaaatgtatcgtccgtagtagaaccgaatgtgatcctacagtggtcttgggagaacatcgttttaaactacccgtggttccagctaatatgcaaactatcatcaatgaagagattgctgaaaagttagctgaggatggatacttctacattatgcatcgttttgaacctgaaagaagaatggactttgttaaaaagatgaaagacaaaggcttgatcagttcaattagtgttggggttaaagacgatgaatatgcactaattgatcaacttgctgaagaaaatcttactcccgattacattaccatcgacgtggctcatggtcatgctcaaagtgtaatcgacatgatccactacattaaagaaaaattaccagctgccttcgtgattgcaggaaacgttggaacaccagaaggagtccgtgaactggaaaatgctggtgccgatgcaactaaagtcggaattggacctggtaaagtatgtattactaagattaagaccggttttggaactggtggttggcaattatcagctctccgttggtgtgccaaagtggctcgtaagccattaatcgctgatggaggaatccgaactcatggtgatattgctaaatcaattcgatttggtgcaactatggtgatgattggttcattatttgccggacatatcgaatcaccaggtgaaactaaggtggaagatggcgtgaagtataaagaatacttcggtagtgcttcgcaataccaaaagggtgaagctaaaaacgttgaaggtaagaagatttggatccatcaacgtggacatttacgtgatacactccaagcaatgcgtgaagatctccaatcatcgatttcctatgcgggcggtagagatttggaagccatccgtaaggtcgattatgtgattgtgaagaattcgatttttaatggtgatgtattgtaaaaaaagagtgtggatgaaaccgggctgactttgaggattgacatgatatcgacataaatctgggttagggatttgtgtcgatattaggttaaccggagaggttaggtttcaggaacaggtttcaaataaaaaaagagtgtgaacgaaaccgggctaggtttcgaaaatacatttccaatacccaaacctaaaaaataactcaacttaagcgcaaatctgaactaaaggtttgcgcttatactgggttaaccagaaaaaaaggcatcaatcgtaatttgcgaccgatacctttttttaattaattattattatttagcccagttaccatttcggaaaaccggaacgatgctaccgtcgggtttaattccatcaatgtgcatttgatccgagccaaccatgaaatcaacgtgggtctgactgatattcatgccatgacgttgtaattcatctggagtcatcgaacttccgttttcgatggtaaatggataagcttctcccaacgccatgtggtcagaagcattttcatcaaaaagggtgttgaagaaaattgtatttgattgtgagattggtgaatcatcgggaaccaaagagatttcaccgagtgatttcgcaccatcgtcggtttggaggaggtgtaagagtacttcttcaccacgatcagcggcagctttaattaccttaccccgttcaaaagtgaggtgaattccctcaataatcgtgcctccatagcttagcggtttcgtcgaagtgacggtaccgtcgatgtggagattatctggggcagtgaaaacttcctctgtaggaatattagcgacgaaggtgttcccagctgcatcctttgcatcagcggcgacccagatatgacctttaggtaaacctacagtaagatcggttccaggggcctggtaatgcaaggcagcgaaagcttgttgattaagccagtccgcatggtgagcaaggtccgcaattttattttgccaagctgcaaccgggtctgcttgatcgaccagcgtggttttgaagatggcttgccataaagcttggacggcctcattgccctttaattctggaaagaccaattcagcccacttaagatcagcggcggccaccaccagccagctaatatcgttgttagtagtgacttgcatgattgggcgcttagctaaaccttgggcagcttggtaagcagcgatgcgtttgctaggaacctcggcgagggcattagggtcatcactaatcaaactgatgcgcgacacgcgttggtcggctaagaattgccatttatctttttcgtaatcaaaaacttgaccaatccgtgcttcagacgcatgcattaagaattggcgagtagtttcaatatcgctccattctaaaattacgtctgcggctcctaaagcataggcttcggcggtaatcaggttggctagatgtttttgcgttacggaagcatataggataatcgtttgtccttcttgaacattcacaccaacacgggtgattaattgggcatacttctttaaatttttttcaagttcgctgtcattcatactgggaaaacctccttatttttttactatcctagcatattttatgcaggaatgctgatataatattcttagaagttgaagggtggctataaaatgaagcagattaaagtaacgagtatctttggcacacgaccagaagccattaagatggcaccagtggttaaggccatgaaaaatgacgaccggtttgaacccatcacggtggtgactggccagcaccgtgaaatgctcgaccaagttttacaaattttccagattaaaccagattatgatttgaacatcatggaaaagagtcaaactttgagtagcattacaagtaaggtcttatctggcatggacgaaattttaaatcacgatcgcccggatttaattttggtacatggagatacgacgacaactttctcagcaggcttgagtgctttttatcaccaaatccctgttggacacgttgaggctggtttacggacttggaataagtattccccatttccagaagaaatgaatcgccaaatgaccgatgtgctaacagatctttattttgctccaaccacaaccagtgaagcaaacttgcttcaggaaaatcatccacaaaaacaaatttttgtgactggtaatacggcgattgatgccttacatgatacggtccaaaaagattaccaaaatgaggttcttgatgaaatcaaggccgaacatcggattatcttagttaccatgcatcgccgtgaaaaccaaggcgttccgatgcaacgagtgtttaaagccatccgccaagtggtcgacgaaactcctgatgtggaagtgattttccctgtccatctcaaccctagggttcaacagatggcagaagaggaattgggcaatgacgctcgaattaaattaattgctcctttagatgtactggacttccataacattgctgctcggagttatttgattatgactgattccggtggagtccaagaagaagccccatccctcggcaaaccagtcctcgtgctccgcgatacgacagaacgtcccgaaggggttgctgccggaactttgaagttagtcggtaccgatccagtagaggttaaaaaacaaatgaccttgttgttgaatgatgcggaggcttacaaccaaatggctcaagctaagaatccgtatggagacgggacagcatcgaaacaaattctagacgccattgctaaatggcaaaaccagtaatcattgtattagttttcgatataataaaggagctgtgactaagctacgataacttgtcggttatctagcagctgtcacagctccctttatattattaataactattgggcgttaaatttatccactaggctacttgcaaaattatccaaacggtctaaatcttcttgggattcaggggcaaggttaattttaagattttccgcaccttgaatggcgtgggctttagtcatggcttcactgaacttatcgaccgctaagcaataatattcagcgtaaaaggtatctccagaaccagctactccaaagactttaccagaaaggtcaagttcagcgaggtcatcaaagaaatccattccttcttctggtagagctccttcatcgtaggtgtaaggaacaatgacgttaatgtcataatcttttagttcggcagcatccgtttgtgaaatttcagtttcatcgacttcaacgccgaggtcttctagggcttcggtgatgatgtcagcgcaatcttcattgttaccagtgatagtggcaaaaactactttagcagtgggcatatttaagtaaccttctttccaattaattcttatcaaagtatagcaaaaaaggagctgattaacattaattcagcagaaactaaaaaaattaccatgattaccgcccagaaaaaggctggtcgctacaatgtttttcttaatggtgaatatgcgtttcccattagtgaagaaacctttatccattttcgtttaagtaaagggatggaaattacgggcgcgctcttagaagagattggtgaatatgagacgagtgcggaagcctacaataaggctttaaatttcttaacgggtcaattgcggacgcaagatgaggtggctaagaaactcctcaagctggatttcccagaagaggttgtcggtcctgtgttagctaagctgactgatttgaacttgctggatgatgccgaatatgccaagagttacgttcggacgatgatgaagacgggggacaagggaccgcgttatctaatcaaccatttgcgtcaaaaaggggtttacgagaatgacatccaaatgggccttgctcttttcactgccgaagaccaagtggagctggcggtccaagtcggcagcaaaattcaaaaacgccaaagtaattccgcccttaaacaacagaaactcaaagttcgacagactttgatgaataagggctttaatttggctacgattgatttagcactccaggaaatcgaatttaaggttgacgaggaggccgaatatgaaaagttagttaagttgggtgaacgtttaattcgaaaacatgcgggtctccctgcctatagtaaaaaagccaaaatcaagcaggctttgtacaacaaaggctttgaaattgacttgattgaacggttcatgcgtgaaaacgagttatagaattctgtagaaaagcttaaagcatggtgcaaatctaaggctggttttgttataattgaagagaaattcaaagctttcagctgtagaaagtgggcttaggctatgtctcagtactcagaaagaccaaaagagggcgagtatattgcgataaaaagctataagcatgatgggagtttgcatcggacttggcgtgagaccatggtcctgaaaaacaacgaagatgagtttattggatgtaatgaccatacggtggtcattgaagatgatggtcgtcgttgggtgaccagggagcctgcgctagtgtattttaataaacatacgtggttcaatgtggtggcgatgattcgagacagtggggtttcgtattattgtaatattgcgtcgccgtttgtgttggatcgcgaagccttaaaatatgtcgattatgatttggacgtaaaggtttttccaaatggcgaacggcgcctacttgatatggacgaatttgaacaattcagtaaaaaatggcgctatcctcaggatacaatcaaaattttattggatagcgttcgcgaattaacgggttggattgatgaaaaacgtgggccattttcggtcgagtttattaatatttggtacaaacgttatctaaatatagcggagcgaaatactcggtaaaaaaggaggtgtgcataacacttcctttttgtgtaaaaaatactaaaattagaatgacgatatcatgcgaggagtacgttatgtttgaaaaatttagaaaaacgccattgatgtattggtctttggagctactaatcgtggcaacgttaatctgggtgtgcacgaagattgatttcctgtttaccccgattgggacgttcattagtaccgtatttatgccaatcattttagccacctttttgtattatatgcttaatcccttggtaaagttgttaactaaggtccgttacaagaaatttaagattccccgcaccttagcaattgtgattgtgtttgtcctatttatcacgttgattgtatggggaattagttctttcttaccgaacttaattgatcaggtttcccaaatgctggggaacttgccttacattgtcaaaaggttgcaaaagaccgtcccacagttgttagaacattcgtggttgaagaagattgacttcgcgccctttatcaaaaatatcaatagtgagattggtaagtatgcggaaggctttttagcagggacggccctgcatatcggtaatctgatttccaccgtaactaatgccacagtggtggtgattaccgtgccaatcatcttgttctatatgctaaaagatggttacaaattgatccccacagttgcccaagtggttccacaccggaatcgtaagaatgtggtggatttatttaataccatgagtgatactttatcttcgtacatttcaggacaagtcattgaatgtttgtttgttgggacgttcacggtcatcggttatatgattatccaacagccctacgggttacttctcggagtgattgcgggaatctgcaatatcatcccttatgtgggtccatattttggaattttcccatctttactagtggcaattgctcaatcaccgggccaagttgtttcagtgattattgtggtattgattgttcaacaggtggacgggaactttatctatcctaatgtgattggtaagtcacttcaaattcacccgttgaccattattattttattgttggtggctggaaagatttctggcattctcggaatgattttagcggtgccagcatatgcgatagttaaagtcttgattaacttcattcatcacatctggaagttagatcaagaaaccattgaagaaaaaattaagcctcaaaaataataataaattggtagatataatggtagtatggtaatatctacagagttagataatataattcaaggagaataaatcttgacaaaagtaattacttacggaacttttgacttattacataaaggtcatatccgtctactcaagcgtgctaaggcactaggagatcatttaaccgtttgtgtttcaactgatgaattcaatgccattaagggcaaaaaagcttatacgtctttcgaagatcgtaagtacattttggaagcgatcaagtatgttgatgaagttattccagaacgtgattgggatcaaaagattagcgatgttaaggaccatgacattgatatctttgtgatgggtgacgactgggaaggtcaatttgattttctaaaagattattgcaaggtcgtctacttgccacgtacggctggtatctcaactactaagatcaaaaaagatcttggactaggcgattacaaaaaagattaggactacaaactaagattgggatgtctagacgattccaatcttattttttagagagaaaggaactactatgaatcaacaagatttaaaaaatgcggtggaaaaacgccggacgtttgccattatttcccatccggatgctggtaagacgacgattacagaacaactattgctcttcggtggcgttgtgcgcgaagccggaacggttaaagcccgtaaatctggcaactacgctaagtctgactggatggaaattgaaaagaaacgtggaatttcggttactagttcggttatgcaatttgattatgctggtaaacgaattaacatcttggatactcctggacatgaggatttctcagaagatacttatcgaaccttgatggccgtggattcagctgtcatggtaattgactccgccaaagggattgagccccaaactaaaaagcttttccaaatttgtaaaatgcgcggtattccaattttcactttcatgaacaagttggatcgggatggacgcgaacccctagacttggttaatgaattggaagaagtcttaggcgtagaagcttatccgatgaactggccgattggaatgggtaagggactagccggattgtacgatatttacaacaaccgcattgaactacatactgatgaaccagaatttttggaactcaacgctgatggcgaactcaaggaaagcaatccgatcgaagaggaaagtgttttccaagacgccatgatggaagtttctttaatgaaagaagccggcaatcaatttgatgaagccaagattgctactggggaattgactcccgtcttctttggttcagctttgactaactttggggttaagactttcttggatgcttacctccaatatgctcctgcaccaacttcacataaagatgaagccggtgaagaaatcgaaccaactgaagaagaattttcaggatttgttttcaagattcaagctaatatgaatcctaatcaccgtgaccggattgcctttttgcgcatttgctctggagaatttgatcgtgggatggacgtcactttgaaccggacgggtaaaactttacgcctttctaattccactcaattcatggcagacacacgtgaaaacgtggaaacagcggttgcgggagatatcatcggactttatgatacgggtaacttccaaattggggatactatttacgctggcaaacatgccattcaatttgaaaaattaccacaatttacaccggaactatttatgcaagtttccgctaaaaacgtgatgaagcaaaagtccttccataagggaatcaagcaattggttcaagaaggagctgtccagctttatactaactacactactggagattatattctcggtgccgtaggtcaacttcaatttgaagttttccaattccggatgcaaaatgaatacaattccgaagtagttatgcaacctatgggtaaaaagactgcgcgctggattgacccagaacaactcgatgaaaaaatgtcgtcttcacgtaacttattggttaaagaccgttatggacaaccattgttcttatttgaaaaccaatttgcagaacgttggtttgctggtaaatacccagatgttaaactaacggccaaactctaaaaactaaatctttctaaattaacacctcaaatggggttaattttttagtttttaatatataatggttaagttgtatcaagaaatatcacgtggaggaacgatagcatgaatcgtttatggggtagatttcgacaggggctaaatactaaatttggcttcttcatgctaattacaggtttattttggattaaatcgtacatagcatatcaaacaaaattcacgctgggtgttcaggatggcatgcaagaattgattctcgccatcagcccgctgggttttgccatacttttgttcgggattggattgtatatccgtggtaagtgggcctactggtacatgattattatggatatcatcttatcgacttggctatttgccaacatcctttattatcgcgagttttcagatttcattacctttaatttaattaagggttctgggtcagcctccgataatctaggaaagagtttgatgggaattctacgaactactgatttcctagtttttattgatgtaattttcgttattgctattttagcgtttggattcgttaagatggatcaaagcaagttcaagttaatgaactcctttgcggtgacggtcctatcgattggggttttagcagctaacttggctttagcttattccaaccgttcaggattattgacgcggacctttgataataactacattgttaagtacctaggactacaaagtttcactttgtatgatggggttaagtcatttgaaaacagcaataagaaaaaggaagctaagggttcacaattagatccgattaagaagttcatcaaagaaaataatgttcctgctaatgttgaatacaaaggggtggctaagggtaaaaatgtcattatcatccatttggaaagtcttcaacaatttgtaattaacaaaaaatggaaaggcgaagaaattacgccgaacattaataagttctacaaggataaaaatactttagcttacgacaacttcttcaatcaagttggtcaaggtaagacggcggatgccgaaatgatgctggaaaattccttatttggtttggcagaaggttcggcgatggtaactgacgggaccaccaatactttccaatcgatgcccgctttaatgcaacaaaatgggtattcgacggccgctttccatggggatgtagctagtttctggaaccgagacaacgcttataagtcatttggttatcaatacttcttcagtaagcaatattacacattgaagaagggctacgttagtggatacgggatgaaggataagctcttcttacaacaatcggctaagtacttggaacaattaccacaaccgttctatgctaaattgattacggtctcgaaccactatccatacggaatcgaaaagaagaacgtttctatcgacaaatgggataccggtgattcaaccgttgatccgtatgtgcaaactgcgcattacttagatcaatcaattggggaattactaaattacttgaagaaaactggtttgtacaataagagcaccatcatgatgtatggtgaccattatgggatttctaacaaccataagccggccattgccaagatcttaggtttgaagggtgtaaccaactatgatcttgcaatgttccaaaaggttcctttcatgattcattcacctggtctaaagggtggtgttaaccacaactacagtggtgaaattgatgtgatgccaaccttattgaatttactcggcatcaagacgccaggcgcttaccaatttggacatgatattaattcaaaacaatacaaccagattgtggcgttccgaaatggggactttgtttcgaagaagtataccaagtacgggggcgacctctacttgacggccactggtgaacaagtcacagacgaaacacctgctcaaaaacaagaagtgaagaagatccaagattacgttaataaagaactcgaatattcagataagattattaatggtgatctcttgcgctttgccaagttggattggtttaagaaggttaataagtcagactacagttacaatatgaagtcggcgctcgaacaactaaataaagctcaaagttctaagacgagtttgattgaacaaaaccacggcaaatcaacgttggatgattatgaaacggatgctcctgaactagaaagcaatgctgataaatcatctagttcaagcagtagttcttcagatagctcagcttcgaagtcttcaagcagtgattcaagtagtagctctagttcatcatctgaaagtagtaagtaacttaaagactgagaagagacctttaggggtgcttctcagtttttttattaagagaggaagcgattttatggcaagtcatttgataattctactattagtgggactaatggccggaatttttggagccatcctgggaattgggggaggaatgattattactccagttttaacggtggcaatgggattagatattaagtatgcgattggggctagtatcattgcggtgattgcaacgagttcgggggcaaccattgcgtatttaaaagatgagatgcttaatttacgagtagcgatgtttttagaaattgcgacgaccgtcggggcgattgttggggcaattatgaccggaatatttaactcgaccgtcctttttgtgctttttggttctttcttggtattttcttcttggaatatgtaccgcaagttgcgtcgcggcggtggtgaagaaggtagtactaaaaatgatcgtttagcaaatcaactcaacttaaatggtagctactatgataaagctcttaagaaaaatgttgattaccaagtagaaaatgttcccggtggttcagccgtaatgtttggggccggattagccagtggattattaggaattggtagtggagctttcaaagttatggcaatggataacattatgaagatgccacttaagccttctagtgctaccagtaacttgatgatgggagtcaccgctgctgccagtgccatggtctatttctttaatggttccattcatgctgatattgcaggaccattagcgattggaattttatttggagctcaattgggaagtcggattatgcaacacctacaaccccgttggattcgaatgatttttattcccgttcttttatatatgggattgcaaatgattctaaaaggatttggggtgaacatctaatgaatgctaaaaaacaagagatgcaacacgtggaattagtcattgggcgtgtccttcaagtgggagtatatatttcagcgctagtgattctattaggaattggtctatggttatttaagaatggttctggatattcgggggctttaccaactcggattacgcctatctttcatggggtgttagcttttaaaccttatgcggttttgatgtttggaattttcttattaattttgacacccgttttacgagtaattgtttcaatttatgcctttgctaaagaaggcgaccgtttgtacgtggtcattactacaattgtactagtaattctaattattggtatggcaattggttatcgcggataaaaaaagaagaggttaggtaaaccataattggtttatctaacctcttcttattatttaatcttttttaggagcaccagtaatttcaatttgatcatctttaatcttagcgtttagttgcttttctgctggatggtcaagatagaagtccgcgatgcgatcttcaatttgttcttgaattacccgacgcaatggacgagcacccatcttaggattgtagcctaaatcaactaagcgttcttcaactggtttggttacatcaacgtgtagtccttgggttgccaacatgctattaacgtctgcaatcattaagtcgacaatttgcattaagttttccttagttagggcttggaactcaacaatgtcgtcaaaacggttcaagaattcaggcttgaagtaatttcccagtttgtcaaggacagagtgggtcttaccttgagcagctgctccaaaaccaacatcagcttgtacgtcaccagttccggcattagaagtcataataatgatggtatctttgaagcttactgtccgaccttgtgaatcagttagacgaccatcatccaagatttgcaagaacatatgcatgacatctgggtgagctttttccacttcatctaggagaactaagctgtatggatgatgacgaacttgttcagttaattgacccgcttcttcgtaaccaacgtaccctggaggcgaaccgattagttttgatattgaatgaggctccatgtactcactcatatcaaagcgaatcatggaatctttagaaccaaacaattgttgcgcaagttgcttagctaactcagtcttaccaactccggtaggaccgacaaagaggaaggaaccaatcgggcgaccagttccgtttaaaccaatgcggttacgacgaatggcacgagaaatcttattgacagcttcatcttgtccaatgacgtggtctttcaagttttctgaaagattttgaagttgttcttgttcctgcttttgcaagtcaccaactggaatgtcagtcttagtttcgataatcttttccatatcttcttcagtgaccgttggttgttcttcgctacttgttgcaccatctttgtttttttcaagcttagaaacttgatcacggtagtaagctgctttttcgtaatcttccgattgaagggcagctttcttttgagcttccgcttcatcaatcttcttttgaatggtttctggatcagcgatgttaatcgttagattcttcttagaaccagcttcatcaaggaggtcgatggccttatcaggaaggaagcgatcttgaatgtagcgttttgataattttacggctgcttcgattgcatcatccgtgtagtgaacatgatgataatcttcgtatttcttttgaattccttttagaatcttaatagcttcttcttcactaggttcatcgacttgcactggttgtaaacgacgggcaagggccgcatccttttcaatgtctcggaattctttaagcgttgtagcaccgactaattggaagtcgcctcgggcaagggctggtttaagaacgttaccagcatccatgccgccttcagcattaccagccccaacaatttcatggatttcatcgatgaagacgaccatgtctttgttagcttgaacttctttcattagttgttgcatgcgttgttcgaattgaccacgaattccagtaccttgaactagagaaactacgtccaaacgcacgatttgtttattaactagcttttgaggaacagaaccttccacaatccgctgagccaatccttctacgacagcagttttaccaaccccagcttccccaattaaaactgggttatttttagtacgacgatttagaatttcgatgacccgttcaatttcgctgtcacgaccgattacgggatcaatcttaccttgtttagctaaatcagttaggttcaagccatactgacttaaaagtgatccgccgttgccacggttgttaggattaccacctgaaccatttccaccacctggttgagtagggggaacttgttgtccatagaggttttcgggttgtcccatattgccgccttgcatcgcacggaagatgtcatctaagtttccaaatccaaatggatcttgtgccatacgagcacctccgtttctattaatgttattatttcgttgattttttaaaagttgatagcaattctgacacagattaacttctgtacgttgaccattcacgttcgtatagaggtgaatgcttgcttcgttcttttgacagttttgacaaagcatctgctgtctcccttctttcaaaaatatgaaacgataattagtcaaataacgtttgactaatattgaccatacccaaattatacacactctatttcagagtgcaagtagtttgatttgaaaaaaagatggataatcaggtaatattattgttgataacaaagtacttaatggtatagaataaatagaccgaagtgaggtgacaacatgcgagattatttacagcttttgaatgatttaaaggatggttcaatcaaagagctaaagattactgcagaggagttccaagatttccagccacgtttcatggaatttcctgaaagaaagcaagtaattggaaaagcagaccgtggcggggttgttgtttatcactttgagcgtatcaaagataaataacggatttatttaagttttatgtaagggcttgctttgcaactaataaattgatatgattcttatcaaaggcttataaataattagtgtacgttcactacttatttgggtcaaaaatatatgtgtaatcaaaaggagatattttattatggaaaaacgcgactttcatgtaattgcagaaacaggtattcatgcacgtccagcaacattgttggtacaatcagctagcaaattcaactcagacattcaattaacttacaaagacaaatcagttaacttgaagtcaatcatgggtgttatgtcacttggtgttggccaaggcgcagacgttactatctcagctgatggtgatgacgaagcagacgcaatcgcagcacttgaagatacaatgaaaaaggaaggactatctgactaatggctggcacattaaaaggtattgcggccagtgatgggattgccattgctaaagcatatttgatggtggatccagatctttcttttgaaaagaaaaacattactgacgttgatgcagaaatcaaacgccttcatgatgctttggaaaagtctaaagaagaactttcactcatcaaagctaaggctgcagaaaaccttggtgctgaagaggcagaagttttcgaagctcatttaaccattctttctgatccagaattgattggtaatattgaagacaaaattaaaaacgacacaattaatgcagaagaagctactaaggaagttacggataactttatttcaatgtttgaagcaatgactgacaatgcttatatgcaagaacgtgccgcagatattcgtgacgttactaaacgtttgatgagtcacttgttgggtgtggaacttcctaaccccgctttgattgattcagaagtcgttattgttgcgcacgacttgactccaagtgatacagctcaattggatcgtcgttacgttaaaggctttattacagatattggtggtcgtacatcacattctgcaattatgtctcgtacccttgaaattccagcagttgttggttctgaaaaggctactactagcgtaaaacaaggcgaaatgatgattgttgatggacttacaggggatgcaattattgcacctactgatgacgaaatcaaagcttatcaacaaaagggtgaagaatttaaggctcaaaaagccgaatgggaaaaacttaagaatgaaaagaccgtttcaaaagacggtgttcattttgacttagctgctaatatcggtacaccagatgatttacaaggtgttcttgacaatggcggtgaagccgttggtttgttccgttctgaattcttatacatgaatgcttccgaattaccatcagaagatgaacaattcgaagcttataagaaggttgttgaaggcatgaacggcaagcaagttgttgttcgtacaatggatattggtggagacaaggaacttccttacttaccacttccagaagaaatgaacccattcttgggttaccgtgcaatccgaattagtttggatcgtacagatttattccgtacacaacttcgtgctttgctccgtgcttcagcatacggtaagctagcaattatgttcccaatgattgctacggtagccgaatttaagaaggcccgtgctatctatgatgacgaacgtcaaaagatggtcgatgctggacaagaagttggtgaaatccaagtcggtatgatgatggaaatcccagctgctgctatgattgctgataagttggctaagtatgtagacttctttagtattggaacaaacgatttgattcaatactcattcgctgctgatcgtggtaacgaaaaggtttcatacttgtatcaaccatataacccatcattgcttcgcttaatcaagcaaactattgatgcttcacatgctgaaggcaagtggactggtatgtgtggtgaaatggccggcgatcaaatcgctgttccaattttaatgggacttggtttagacgaattctcaatgagtgcaacttcaatcttgaagacccgttcattgatgaagaagttaacaactgacgatatgaagaagttagctgaaaaggctgttacagaagctgaaactaacgaagatgtaatcaagttagttcaagaaactgttgacaacatttaatctaaagcaaactattttagaaccgctgaccttagtgtcgcggttcttttttattctctaggaggaaaaccaatgaaattaaaattaaagtcgggagcccaaatcttttttgaagatgaaggacaaggtacacctattctgtttttaacgggctttggaggcaatactgaaatttggtcgggacaagtgaacttctttttgcaaagaggttatcgagtgattcgattagattatctaaatcatggtcaatctgatcgagtagatggtgaacttcaaatcggagatttagcggatgaagttctacaattagtagattatttacaattaaaagaacccatcggaattggtaattcgatgggagcagcagtattgtggaatattattaaccttcgaggctgggatttcttgagtaaggccatctttgtggatcagtcacctaagatgttaaatgatcaacagtggcacctcggatttaaaaatttagcggaggataattttgatgaagtaatgaacgaaccgattgtccgtccagcctataaacacattgatgattttgtcttcaaaaattctaaggccattgattcagcctatccattttctcaacctcagaaccgagctttggttaaggggcatgcgaaaagggattggcgctttgtcttagaacaggcgacgaaaccagtgttgtttataatgggggaaaaaagccccttctttgatagcaccaagaccgctgaactatctgccttaaatgctaatatcacggttaatgtaatgaaaaatgtggggcacattccgatggcagaggaccccgctgaattcaatcgattagtattacaatttgtctaaggttgacgggcaaggtttgcatatcacattttaaaccaatataattaacaccaacacatagttatttagtatggaaagggagatttgctgtgaatattggattgtttaccgacacctactttccgcaggtaagcggagtagctacatcgataaaaacactacgagaccagcttgaaaagcaaggtcatcaagtgtatatcttcactactacagatcctaaggtcgataccaatgtatacgaacggaacatctttaggtttacgagtgttccgttcgtatcttttacagatcggaggattgcagttagtggatttattcgggctgctcagctggtcaaagagttaaacttggacattgttcacacgcaaactgagttttcactaggctggatgggaaagtttgtggctaagtctttgaaaataccacttattcatacatatcacaccatgtacgaagactacttgcactacgttgctaatggtaaattgctcaagccatatcatgttaaacagatgacgcgggccttttgttatcatatcgacggaattgttgctcctagtgaacgagttttagatacgattgaaggatatggcattaacgttccgattcgagtaatcccaacgggggtcaacctagaacagtatcaaaaaccaaacaagcgtaagcagtggcgagaaaaattgggttacgacgaaagtagtcctattcttctttcactaagtcgtttagcctacgagaagaatattcaagaagtgattgatagttttccagccatcttaaaagaggtacccaatgcacaactgctaattgtaggggatgggccagcgcgcgccagtctggaaaaccaagtgcatgacttacatttagaagatagtgtccaatttaccggagagatcaacaatgatcacgtctatggtttttatcaactagctgatttatttgtttcagcttcagatactgaatcacaaggtcttacatatattgaggctttagcatcgaacttaaaggtggttgctaagtcaggtccttatacagatgtactactagatgatatttctttaggaaaagtgtttaatactgaagaacaattagtagctgcaatcaaggactacattgaacatccagatgcttataatgatccagcaccacgtgaaaaaaaactctatgagatttcagcggattattttggtaagcaagttgttgattactatagtagtgcaattagtacacatacagatttagagttagacgaagattctgaatagaatcgggtttaaaatcagaataattttgtttaatgttaggggttaaggtatgccaattaaggtcaacatgttttcatcagctagtaaggtaaaggggcaaggtgtcggcagtgcgtatgaagaactcattcgtttgttgaagacccattttccaaagcaaattgatgtttcaatcaataaatttactaaggctgatattagtcactatcacaccatcgaccctaatttctatttatcaaccttttctaaaaaaaggggaattaaggtcggttatgtgcactttttaccggaaacgattgagggaagtttaaatattccacaacctttccgttctattttttataaatacattatctcgttttataagcgaatggatcatattgtagtggtgaaccccacatttattgataaattagttgcttatgggattagtcgggatattattacttatattcccaattttgtccgtaagaatgaattttaccgttttacagaggtaaatcgggatgcggtacgggaacgtttggaggttaataaccgttttaccgtgctaggcatcggacaagtccaagaacgtaaaggggttaaagattttatcaaacttgcggagaataaccctgataagtattttatctgggcaggaggtttttcatttggtcgattaaccgatggatatgccgatttgaagcaggtggttgataatccacctcgtaatttaaaatttacggggattgtagatcgtaatgcgttggtagaatactataatgcggccgacctatttctattaccttcatacaacgagttatttccaatgtcggttttagaagcctttagctgtggtgttccagtcatgttgagggacttagagttgtatcattccattattaaggggtactatatacctactcaagattatgaggatatgaatactcaactcaaattagtatcagaagataaagaaaggctgaataagtttaagcagctatcagacgaagcttcggaagaatactctgaagaccatctagctgatatatggttagacttttattcatctttgaccaaatagggggagtttatctatgtcaaggaggaataaagtagtccttgcggtgatgattctagctggtattataatttttggcttttcattacgaaacgttaatttgaatcagatggcacgggatgttgtccacttgaatatgtggtggctacttgtagcttcaggatgcattgtgttatacctcgggttagaagcagtagctaccaaaatgttgattcaaagtaacggggatcgtttatcatggagggatgctatccgaattccactaattgaacagctgtttaacgggatcacacccttttcatcagggggacaacccgctcaattggtggctttaatgcaaaatgggattgaaggtggtcgagcgagctcggttctactaatgaagtttgtggtattccagtccatggtcgtcatcaacttcatttttagtttattgattggctttcagtaccttgaagagaaaatccgtttcttatcttggttcgtcttatttggctttttaatccatttagcggtgattattggcttgttgatgattatgtattggcataacttcactaagcggctgatatcggttatttttataccaattaagcattttgtcagtaaggaacgttacacaacttggaaggttacgttaaatgagaaggtcgactccttttatcaagagagtgtcaggatgaaatcacagtggagattactagctaaagtagccctggtgactttcttacaactgcttttctactatctaatcccgtattttatcctattagctttaggaaaaagcgatgttaatatcgtaatggttacttgtttacatgtgctaatcttcatggttatctctttatttccaattccagggggagcggggggagccgaatacggctttagtgtcatcttcgctcagtttgttggtaataatagtaagttagtcttagctatgataatctggagaatcctaacctattactttggaatgttcgctgggatggtagcaactgtagttaaacctcataaagtaaaccgcgtaaaagtagttaaaaacgagtgatttcactcgtttttatttttttttcaaaaaagggttgaccaatccccgttatcttgataatatatttaagtgctcttctgaagggcacgtacgactggttaaacttcaaatcttgataaaaaagaaatgaaaaaagttcttgacaagatataacgaagtttggtagactggttaagcgaggttaacgcctcggtcgttgagaatgagaaattgtttaaaaaaacttttcatatttattttgatttttttcaaaaaagatttccagccttcgttttgcacaacaaaaaaagagctccaacccccatacgacggcgtttcgtcaccatgttggtcttcactcttttagtttttctactataaataattaaaggtcttctggaatatcatcaataggaaccaccgtcatagctccttgccgataaacattaatgtgatgaatgtcgtgggctttgagcatatctaaggcatctcggaagtgatcttcatagtgcgctgcgtcatgggcgtctgacccaatcgtataacgcttgccccctaattgcttgtagatttcaattgcgtaatcatacaaaccaatgttgtggtatttgtacatgctcttggtgttcaattcaaaggccaagttattttgaatggcaactttaaagatgttagtgagcaagactccggccgtggtcgagaattgaccagacgtcaaacttaatctccgtaccccataatcgaagtgagctaacacatcggcgtcatggaattcgttgattcccttccacatcaactggtaatactgatcggtcacttggagcggatctaagtgcgagacaatgtcactcccaaagtctttcgtaccatcttgatggaaacttagtaacttaatatcgaacgtatggtgggctaaatagtctttaatcttatctgcttgtccggctgacatcccgatttcaattcctttatgaactcgtttgcccgtcgcttttttcaaacgttcaatttcggccacgtatttagtgtagtctggaatactatcatggttttggacttctggattgttaaattccaaatgttccgtagaaacaaagtcctgtccggccaacttcatgtagtcttccatcttttcatttgaatcaaacgaaaagcttgtatgcacatgctggtcataaataatcataattttgccctcctcgttctaaaatgtatccgttctctactactattttagcatagcaacgcattttaacgcttgtctcaacgcttggagaggatagggaaaatgattttaatcgagatcttcaccgtttgtgcgaattactttttgataccagccaaaggaatctttcttagagcgttggagcgttccgttgccatcatcatccttatcaacatagataaagccgtagcgtttagacatttgaccagttccagctgaaacgaggtcgataaagccccatggagtataacctatcaagtttacgccatctaattcaactgctttttccatttcttggatgtgagctcggagataatccacacggtatggatcatgaattgccccgtcactttcgaccgtatcgtaagcccctaatccattttcaacaataaacattggtaagtggtagcggtcgtttaaccaattgagggaataacggagacccactggatcaattggccaatcccaatcactagttgcaagatatggattttcaaccgttacgtcttctggagctaagttttcatcaattgacagaccttcaggaagagccacggtgttggaattgtagtaactaaagcctacataatccactgttcctgctttaaggatttcacggtccgcttctgtaatgtctggacggtaacccttttgttgcaagtaagtttcaacgttttctggataaaccccgttgacatgcacatcggagaaccagtagcgacgttgcattaaacgttcagccaacatgatgttatttggggctgcattgagcggataaaatggcgtgaaattaatcatgcaaccgatttggaagtctggattaatttcatgacccaacttaactgctttagcactagctactaattcatagtgagcagcttgatacatcgctgcttcacgattttcatcccccttgaaaactaaccctgagttggtagccatcaagaagtcattattgtatatactctgattattgatttcattgaacgtcatccaattcttaaccttatccttgtagcgtttgaaacaagtttcagcgaaacgaacataaagatcaattacgtgacggtcagaaaaaccattgtatttcttaactaaatgatagggcatttcaaaatgtgccaatgtaattaccggttcaatcccgtatttcaagcattcatcaaagagatcatcataaaatttcaaaccagcttcattaggttcagcatcgtcaccattaggaaagatgcgggtccaagcaatcgaagtacggaaagcttttaagcctaattcggcaaacattttaacgtcttcacgataatgatggtaaaaatcgattccttcgtggttagggtaattttcacccggcactaccccatcggtaatcttccgcggtaccttgttagctcccgccgtcatcacgtcggccatgctaacccctttaccatctgcttgccatgctccttctaattgatgagcagccacagcgccgccccataaaaagttttctggtaattttgtcattttcatccatcctctcttttaatgagctttttctgtagaaagccttttcatagataagtttgaactattttccattttttgtatagctttcacggcaaacaaaaaacatattccgcagataaaacggaatatgttttatttattttgaagtgatttacgttcgggactaatccaagtcccagaaccaaaaccaaaaccaaaaatcgttttaagagccggtacaaacgtcatgaccaccgtcacgggattgaccatccagaaaaagagcatataaagcggcgcaaaaataaggtattttaacttagcagcatgatgatccaaaattaaagccgctaataattgtaagaacccggccagtagctcaaaggtaacaaagataaaagacatcacgattccgtgaaagacccgttcgtaattccccatcagtaagaaaaccaacatggcaatgataaaaacagcggtggtaatcataaagaaaaatgaccagataatggaaagggttgagtcaataaacatcgacatttgataacgatgcttaatcggatgtaagaggaacttcttaatattggtcaaccacacttcagttcccccttgcgcccaacgcttacgttggtgataaagatctttaagggattcggggacattcatgtgaaagacaatattgggagcaaaccgcggaatcgccccaatcatctggtgatcccaggcaatactaatatcttcggtcgcccgattttgccggaagcctcccacgtcaatcagaaaactcttgcgatacaacgtgttggcgccactgtaggcatacatcgaatcattaattgaagtttgactgcgtttgatgaccccaacaatacttgaaaattcaaccgtctgggccttacctaaaatcttcgtgcggttttgaacatccatattagctgttaccgccgaggtattcatatccaggtcgtgcatgaaaaagttcatgtacttcatcaaagcatccggttcgggaatcgtatcagcatcattactaagaatgtattcccctttcgcaaaatacatcccaatgttaaaagcgtgcgccttccctttattttttaagattttaatcgtccgcaggcgtggatattgttttctcaagcgtgctaagattgctcccgtttgatccgtcgagccatcgtcagcgactaaaacttcaaaattagtgtaattaatttcgttaaaaagataggtgatcgtttcttcaatcatgacttcttcattatgggctggaatcatgatggtaattaatggttggtccgcaggtagaatattttcccagccttcatcccgtttatgggttttcaaaaagcgatacgacaatgaacctgtaaaccagaagaacgccccgattacaggatataaacaaagtatcaaaagaataatgttaatggtcgtatcaatcagggatcctttgaaaatactatcaataaagattgatgacatttttgctccttatccgagatcgtctaaattagatgctcgataaatttctttaatttcgtctgtatccagattttgttctggttttacttcgtagtacctggtattttcacgaaattccttactgccaaatcgggcgtccataaatgcttctaatgtatcttcccgtcgacgctgattaattggattgtaggtaggccactgttcagccagccgatcccgtcgccgattttgaataatcgtcatactcgtcgcaaacaagctcgccatgacaaatgcaaaggccagtaagattccgataaatttaatttcaaaaattccttcactataagaccagatatgcggaatcttgggattataaatcgcccaaaaggaagtgacggtgatgatgataggaacaaacacacacatccaaccgaaaatggcgactaacgtttgccatattttcaaccaccagtgtcctttttcaaaatacaaatctgtatatagctgctgacgttctttttcgtttttcatcctaaacctgctttcggtaaacatcctccggcttgccaaaaagatagccttggcgcgcatcaatccggagctgctccgctaacgcctcgtcggcttcattttcaattcccactaaaaccaatttaatttcattttcttgggccaacttattccaaaattggagattaagatcgagccattcgttgggatctttctttctaaagctactcatggaagcctttaaaatatcaatttcgcttagtaaccactcaatatgtttcaaatcatttaaagatgaacctacattattaatcgtgaattgaactccatagctacgcccaatctgaattcttcttttaaaaagacggcgattggttagccgattcatttcatggattgaaagttcaatagctaaattaagtggctcaattttcgcaattgcccaccgcacaaagtattcaaaagccggactcataatttggttgtaagttaatttgatagaaagagttacatgctcatcggctagagattggaaagtcgtctccagtaagctaatcacgcgttgcagtggtagggattcaaaattacgtggcaaaacccactgtcccgcttcattttgcgtgcgcaataggcgctcgtagccaatggtatttcccttacgatcaacttgtttttggataaaataacgaagtgggatttcatcattccgtaaataatcgctccccttattccgggtccaccagtaatatcccccgataattccaatagtgatagccgccgtcagcactgtaatccaccataaatatatttcaagtttttctagtgtcatatcgttaacctttccgtttattttaaaactaaaaaaaacgattggcattaccttttggcgtgattttaatattttttaaactgataccgtttattattaatgatgataagcaatttcatattaaaaaacaacttaatttagcaattttgtacaatggtggaatatgctgtgtaatgctgtttcatccgttttcaatcattattaacttttaaagttctaagcgattgtgtaatcattaacatagtttcacagtgactaaaaagtagaaaataaaaaagctgtatagtaatcgaaaatcgatttctatacagcttgctagaattaactttaatggttaggcaataccctgaatgaattcttcaacttcttggggagtacggcgttcacctttaccaaaacggccgagttccttaccgtcttcaagggcgataaaacttggaatacccatcacaccaaaatgttgagcaacttctagattgtcatcacggtcaaccgtaatccaatcatattgatcgtacttcttcatgatgtccggcattgcgggcttgatgaaggcacaatcagggcaccagccagctgtaaagaataacattttcttacctgaattcattgcttcaaaaatttcttcgttagttaaatttgcttgagtgctcattttgaattgctccttttattaaaaactagcttactttttgtaagctgttatctatatcaaatattctatcagcttccagtcgttttgacaaccaattaatttgcccaatttaactcctcaggcgcgagttggtataccttgtccgctcgataggaattaatcaatttaaaatcttgtgctatgtatttttcatcccataaaaattggttaatttcacgtgaaacattttggcttcgatttaactcacagtgatagccgtcgggtccaattaccatcaactcggaaactttggctgctaccatcgaggaggtagcccactgcgcgggccgaatcaactgccacatagacatcattatttaaaattccatccacgctcccaattacgtttaaaacttcagcccctttaggaaacaagtggcgattacgaactagctttttaaaatgatgggttcttttattaggttcccaacttttggtcattacatctttaacagtatcctgtgaaagaaatccatgtaatccattgaaaggacccgcaatggtcactaattttttcaaagctggtaaacgtgaatctttgccaaacttaatcgctaaattaaccaggacattacttcctagcgaatgaccgaccccattgtactgttcgactccaaaactttgtcttaatttaattaataactggtgcatccaactaacttgccggcgttcaggagcccgattgttttcaaacaacacctgaaccatcggattagcgacctgctgatcgagttcgccatcaaaatccattgccccatcatttttgattttggccaccagcatcttttgcgcccagccatttttctgtgctccatgaatcaaatggtccgtagaatccgcatttccattaaatccatgcacaaaaattgttactgcattcatctctcattaacgctcccccacttaaaacttgcatcatccattctactacaaaaatattaaaagggctgcgcccaaaagaaagattactcttgagacgcagccgctttatgattaaaccaaaatggttgtttggtcatccatattttcaagtcaaaagcttgtaatggtaaatcttccccattaacttgaccatgttcattttcaaaagcttgcacgtgaatttctcgtccagttttaaagaaaacatccggcatatcgagatgctttccaccacgtaagagcttaataaataacttaacaaacttgaagaaactcaatttttcagtaattaccacgtctagttttccgtcgtgcaagttagcgcgaggtgcaatgccaacccctccaccaaaatatttgatattcgttagtgaaacgacgaaggcattcgcaaattcatgacgctcaccatcaatatcaatcgtaagtggaaatcctttttgacgcattgacgttttgaggagggccgaaacgtacgccatcgattctaagtgccacttgctcagcttaactttctgaccttgattggcttcatagaccactcgggcatcaaagccaatcccaatgttgttggtaaaatactgggtcagttggttcgcttgattctgataagctccaatatctaaggtgattggggtggtggtctggattaattgctgtaaggccgtggatggatcagaggcgatgccgactgcccgtgcaaaatcattccccgaacccgctggaacatagccaatgggaacggtgtttttagagcgtcgcactccattcagcacttctaggagggtaccatccccaccaatagcaacaattacccagccttgcggatgtagatcggcaaattcttgggctaactgggtcgcatgttgggggtattttgttaccacacgttcgaagttaacagcgttttgcacgaggagttgatggagctgttcccacgtatgggctgaatggtgcgctcccgcccatttatttacaataaaataatatttaatctgttcattcatgctagtctacatacttctccaaaaaatttgctacctcgatatgatagcgatgcggattggttgggagagcttgcacgtgatcggcttggtcaaccaaataaacttggctgggaacacgagctgcttccactaaatcatccagcatttcgattggaacataacgatcggcttcgccatggataaacatgatcggaactcgaacttttttaacctgttcttgaatattagcttctttaaatgagtaaccagcttcttttttggttaatgcactagcaatcgcctcaaattcttgcgatggtaaatgatagtagcgtttcaaacgatgccggaattgtttgtctaaacggttaaaactactatcttcaatcacagcagttaagttagtcgccatatctggttctcctgccgcagaaatcacagttgcggcacccatgctaatccccattaaaacaattttttcatccgtatgggttaataaaacagcgcgttgaacccaacgtacatagtcgcggcgatccagccacccaaaaccaattagattgccttcgctttcaccatgactgcgtgcatcgggcatcaagacgttgtagcccatattatagaagattttggcatacggaatcatttgcatccgggcgtgatggtatccgtgggctaaaataaccgtctttttagactgtttggcttctggttgtcgtaaaaatgatgctcgcaattgaaggccatcttcactaagcatactaatttcttctgggtttaaattattaaaccattcaatattgagggcattattatcttgagattgtgaacgttcaatggctttattcttagctttttccgtatttttaatcccaactaaaaaactaatatatccgccaattcccattccagcagtaattccgaaagctgcggcacctaagccagctaacatatatttagtacttttattcattaataacgctccttatctttagccaacttgctaaaaaacattatccgttaatggtaactttctctcattataatatcaatttttgggttaaaagtggtatgataaacgtgaaaacgggtccgtagctcagttgggagagcacctgcttcgcatgtagggggtcgacggttcaagtccgttcggatccattgaagacgttacagatgaacgtaaatggtatcaaaacgctggtatgtcagcattcttaattttagataatctcatataaaagcatacaatttatacgaggggtagccaaaagggaagccaaaaactggagtgatttaaacaatgaataataaaagaagcttgcggagacgcacctagaccaattatctttagttagatagttggtcttttattttgaacaaggaagccaaaaagctataaaaaaagatgtgcttaattttgcgcacatcttttactttgatcgcatttcaataatacgtttttcaattccatctctcaccattctaaatgcccttaatttgtcgctttctgttccttgaattaaagctgggtcaataaacccccaatgttctcttttaactgtagacggtgttacagggcacttatctttagcgtctccgcataaagtaatcactagatcactatgatttagataatccatatcgattaacttagacttatttttagagatatctatatttttttcatgcattactttaaccgcatatggatttaatccgtgcacctcaatcccagcactggcaattacccaatcaggaaaatatttctttgccatcccttccgccatttgactcctgcatgaattacctgtgcacaaaaaatatacttgcattaatgacgcctccacaaacattattctatctaactagtgattaaatcatatcaaattcttagcttatcaacatgcttaaattacaaatactttttattatcattgccacttttggcagtgatatgttttttagttcgctgtcgctcaaaacgatagccaattaatcctgttaaccttcaaaaggatatgaaaatcatataatgtaaaattgccgtctattataatttaactttttcaagggaggcacaattcattactcccctctgaaaaggatgtcctaaattgaaacttcctcttttacagagtatcacccctattgagggacttttttccaatttcgggagaaagtaatatggggttccattttggcacctcatcttttttgttaggatagatttacagctagattaaacacaaatcctagggaaacataatttttaataagaacaacaaaaaaactctctagagttaactagagagctatcgactaatggaggagtattccattgccatgataataacatatatgcgttcgctaaatatacttttaggcctgacataagacaaaagggagccttctagaatagaaaaactagaaggctccttttcgtgtaaggtaaataataaatccaaggaattgactatattttaatacttaatccagcaaaatactatacattttaaaaaataaaaccatttatcttgaatggcaataatttagaggattaataagtaattaatctccaaacgaacaccaaatcacgttgaccaagggtatcataatctacccttaattacagtaataacgtgtcacacaatacaattaataatacttgattgtgagcttataaagaatacattactctgtctattaaaataaaacggataataaacctatttcctaaaaaaggcacactattgatgtaaattatagtaacaatgttgctacatcaacgtttattcggggtacccccctaccctaaaaattttaaaagtagcatatagtgagagaacattatggcgtttcgctctttatcagaaagcctatggggcgggggttatttgactcttctcgactttcatataccttttatttaaaaaatagagccgttaaatattttaacgactctactaaaaaattagatttattggaaatggggtgctttaattataacattaaatgaccttacctgtttaaatttgcgttttttctagcaatctattagctattacattacttttcttttcctgttgcactaatgttcgatcttgtaattcaaaatcaattccacgataatacggaactttttcaaattctcttaaactatcaatgtattcatctaactgctttgaatatttcgccttcatttgttcattctttcgtatttcttcttgtgcttgtttgtttaattgttcaatattaaactcatcatttaattgctgcaatttttcatcagctgagacattgttgttccttgcattaattgaaccatggtattgttgaacttgctgattaagcctgtttatatctctaaacactccaccatcaacaacacttgctccatctgttattgtcgacttaatggcacgaagttgatccaatacaaactttacttcgaagttgtctagcgctgtagtgtccctatcattgatatatgctaatagttttgtatgaacacttgataatgctttgtagtacgcttgctgagccgttgtactatattcaggtttagctggtacttctacctcaatagatttattttttctcataatgttgttgtctctctttctattcgattcaattctttcaatagtttacttttagttttactgtggatactacgtttgtttaaattaataaagcttccacctctataatgtatattctctttttcatatgctctgataactgccttttgctctaaagaaaagctagtattattgtagttcattattctcacctcccctccctaatatcctaaggttcttgtaattctcattgactaccattcttcttaattactcttaagtcttctgtatctacaaaagcataagcaaattctattagtccactattaagtatctctctgcctcgactacgtccatagccggttaattctccaatttcataccaggtcaaacatttaaaatagcggtattcaataaacttccttttattttctcttatccctgcaagtgcctctttaatcttagctagtatttcaatagcgtacatataattattcatcttgctatcaatgccattactggtaacacttttattaggtaaatcacttaacgttgggcttttaatatccatatacgatacatgcgccatattctgtagtgtctgaaaatctttttcaaagaaccttttaacttgtttaattgttgctttatgatttatttcaagtagtagcatggttgtatacctcatgatctgatatagtagcctaaaaaatttaatctactcatactcagacgtatcaggggtaacttgttggtaagttgctccttttttgttgctcaatcacagctaagtcgttctgaacgacctagaaaaaattatgcattaattcttctaagttcgacctcgttgccttccatatcaaagtaacgacgtttgtaataatttccactggtatatattacctcttcaatagtcaacttattggtctttggaattggtaaatcatattttcttaagtaaaacgctaatccttcataatcctttttgcccaacgctttagttatccctttaatgctgtatcctgcttgtaccattgctttcaattgtttacggtacttttctagctttaattgtgccttagttttaggctttaactttaaactatccaatgctttagcaatttgagaatctctgcagtctaattcaaaggcaatttcacgaattgaacagcctactttaattgctgtacgcaaggctatcgaatacttattgatcaaatctgaaacattagtaaacttaatcttacttaatacttttaaagcttgttgcttctcggttaatttcccttttctacccgtttgaccttcttcactactttgttgccttagccctctagcatatgaccagaagcgagcacacacatcacaatttataatttcacaattataaggatcatgagtaccttgaatacgagttaattctttagtcgtgtacttcatcattttcaccttctaaatatagatcgctcattcctaacaagtctgcaatgttatataaccgttcttgcatcaaatcctgtacatcttggatcgttacaggtctgactgttccgccttctttaatatcgccccatgatttagcatctgcgatttcaatagcatcctttagtgcgtctctcacattttcaaattctgtcatttctatttcctcctaatagccgtaattggcttctctaaattcttgtagtggtacttgctttaaaatctttattacttctttgtacttaaccatcaaatacccaccaatcatggtataatagtattcgtagatagttactggcgaataggcatacctttttatggaatgtctatttttttattcgttcaatttggaactatttcaatagtagtttttaggataaatcatatataaccattcatctttggtagttctggccggtaaatggttatattttttataaaatgtgttattcagtcttcaaagagtgatgttccacttttgttcttgttatgttccacctaaatggaacataacaacccttacagccacagggctttaactctgtttgttccactgttacacttttttcttcaaactctttatatatctttttttatttactctataaccccaattaggttttataagtggaacaatggaacataataactataaatactgataaataggcatttatacatgttccacttttgataaattaatggaacattaactggaacatggaacataggaattaaaagtcttttcggtttccaaactaaaatcatgtgagtaaaccttatttaatctatctaattctttaattgattcctcaagattagctttaacttgttccctaaattgttccttgtttgttcctaaagttgtacccaaaaatttcttacagcctctaactgtgttcctaaagttcctaaaaaatatcactccaaaagcttttctatataaaaagcatatacatactctttttttgcataattttaaatatatacataaattaaggaactttaggaacgaatccctttgtatcagcattcttaagactattttttggaacgttttaaggaacgttttaggaacacttttaggaacattgttataactaatcattttcttttaatttaagaccaatatatctatgaactggttgttccgtggtactccaacctttacgattcttaatctttttgatacccaatctttttaagttagcggtaatagtttgtgctgtagccttatcggagtagttattcatatgacaaaattctttataagcacttaccacataactagccttctcacccttatcactggttaaatcaatttcacaccattcatctataaattcgccgaagtgatcattggacttatgccattgttcagatgcttcaattacacttttaggcttctcaaagcgtctattatccaacgctactttaaaagctcttaaacaagcatatacaaagcagttacgctcttctttaactgctttcatatcttggttatcccaaaaataattatctggttgccttgtatcaccatttactaattcgataaccattaatctatctttaaaacctgttgaattatcactaaaggttggtagttcgttagcgctaaatagtaatttagcgtagttagtaaaactaatcccttgtacccccttagcttcggcgtctgctccatctccacccgttaatgactttaaaacgtccgtattttgtagataccctttttcgatatctgccacaatattagcttctttttgatacagctgtatcatcttaaaccggttatcccccgctaattcttttggctttacagtagaaacgttattaatacccaatatgtcatgaataatataatttagtaacgtgcttttgccttcgccaccattcccgtgtaaaaatacggtatcctgaataggttcgtgcgaatggtaaaacatatatcctaaatactgcttaaacattggtacaacatctttagtcatcattcctgctaataacttatctgtgtgtggggtcggttctccactcatatctaaatcataatcgtgataattaactagcacatttgaagctttatgcggttctaactgttccgtcttaaaattataggttccgttcttaaacgctactaagttagggttagattcatcaaaagggatggtgcttacatcttcctgcaacgccttagcatagacatattcagctactgcgttgctagttttgatatcccactcaatgttattttcttcaaatttattaataataatctttttaacaaagctttttaattcattgttattgaataatttccacacaccatgtttgctctgatacctggcgccctctggtaactttgaatatctttctattatattttctttgagaatttcattacctaatgtcccaaccaaaattcgcattttaactttttgtgttcgtctacctgcgttcactaatgtaaatttttgccatgctggtgatttttcacttaaacaatttacatatttaacccctagcaatttccattcattggcagtatagtcatcaaacgataaggtgttaaaattaactaattcggacgtctgtttctttcgattactttctgattgctcaaagtctttaataccttccataacttcttctggtatctcgttcaaacgctcaccccctttaatcgtttagcttctctttgcagtacagatttaaaaattccgtttagttctttatctgataaagctggattaacaaaatgttggttagcaatgcaagcaaattcatatactactttaggtgctgtgccttgatacaacatcttgcctatcatcttagttaaataggtatttctctgccctgtagtggctccttgtgccatctcttctaatagataagctccataacgtttaatattgttgtactgagcggaattttccgctgagtgactgggattaacttttgccatatcaactagccacatcggtgcctctttgatatctttaaagctcatatgtttagctggttcatatcctctagaaggtgctataactatctggtcggtaatgatttctaccccgttacccagattggtcttgtctcttaactgcttagcattcgtcttaaagaagaaatgcaaaccgttatgtggagtactttcaaagtaagtttcactaaagaaattaccatgctgttcagcaagcttatataacgcctctgtaccatttttaccttctgtgtgtctatccacatctaaaacaattaaatgacttgtatttaatcgtatattgatatcagtagaatgcttaaacaaacgttttaatttctttagttcagtcgttgcgtcatagtgtccgtgtggagtaaggggctttttatctttagtgggataactagcaatacccaattcagcaagttctaacgctttattaattgcttgcacgtccactcacctcgtcaatcggtctaatacaagcttctacatccttttgaatttcttcaattaaatctaaagccgtcctacaagtaaaaaatgcacgatcatccatataactcgcttgtataaccatatttgtatgatcattattttctacagcgtcacttagattcgctaaatcattgccaacataactcaataaagcacttacttgaataattttgtaattagtatcttctaaatctggtaaattatttttcatgtttgttttacttttaggaatttgttagaattgagtacaataaaaacgctggtaaacgttattattccgccattcatcattgccgtgatggatggtttttttatactcttttttttcattcctaatcctttcttatacttagtattaagcctccgcaagctttcctaaaatttcatattttccataaattcatcaatatcattcttatcaatccgctttaatccatctggatcaatcactctcaaacctctattaatgaattctttcttaaatgtattaactgcaactcctgcatagcctgaagcgtttttaatagtcatatatcttggatacttttgttgttgtacaacttcactaaatgcttcctgtgcactttttagcatcacaccatgaataacattcaagctttcttcacttaacgttagtggtatttccatacttctcgcctcctaatagtgtgctttacctaattcataggctcccagcactaaaatcgtgcataacagaaatgcttttactgatatatatgccaccatgacttagttcctcgctttctctggtatttttagcgttgtttgatagataacaccttgattacttaaaacgtctttaatcgcttgataatccattcctaaatcaattaaagtggttatctgattttgacgtttatttaaggcgtctaactctgctttatttagaaaatctaagggagtagctttcttgtccacccttctagcttcgcgcaacttgctaacgtcaaaccctaacgccgttttatacaacaatttagtaaagttactgtacacgtaccatttatcactcaatactgagctttctttaatagcgtcggtcatttcacgtctaccagctttacccgacgtacgaactaactgacgctgtaataactcggttttcatagcgtaaaactggcgaactaactctttcttaaatgctcttacttgcggtgtgttatcaagataagtaattaatagtgttgcttgttcttcactaagttgataaatctttttaggtcgtccacgtccacttaatttacgcatttcaaatgccaatattccgtactcttctaaatcatttttatattgcctaactagttggttcacagcatgttttgaaacccctgcatactccgctatcatatccgctgttgtaaatggttcatcatacaaactaaacgtttccgtaaatactacgtttgatttcattttctacacttccttataatttatttctatagggctttagcacttatcactactggatcgttgttttagtgcaatataaatttgaaagctcttaatttgcttaaattacttttcctcaacctacatagataacatagggtgatactatttaattcaagtaaaaaaaatctgaaatcaaattttagattccgtatttctcatgcaaatattcataaatcccattaactaaattttcagcaccaagtccaacgtcttgtttgtttattgccctattcagaaacgttcttgattttccaaatttagcggacaaagtagtctgtgtttcttgtttcttgtggttagcaagccaagccttaattgcttcagcttttttatttgtttccatatggataaacatgggttcacctccatttataaatattgttaagaataattccagaaatttgttgcaatattctaaaatatatcttagaataaagacataattaaataagcaataaaaagcattctatatcgcctgccagccgatttataggtgtttttaatttgctctttttattaactatatttcttaacaagatttattctaaaacatatattagattttttcaagttttttctaaaatttgttttagattaatgaggttaaagtttggagaaacattattatgacgctatttgataagattaaaaaagtttccaaagaacgcggatattcaatagcagaagtagaacgtaaagctggaataagtgctaattatttatatcagtggaagaaaagagagccaagtccaaagtctctagcttctgttgccaaagttctaggtgtatctgtagattatctattgggtacagatgataaaccctctactactaatgaacccgtcgacctagacaaagccctatctgaagaaggtatagccatgtttgatggtaagccactttcagaagaatataaaaaagctctattggctatgcttagggctaataagaatagtggtgaatagtattatgcacaataatttacatgatgatttattggctcgtcttatttatatcgcggataaagcaggaattaagatagaaaacattgaaggcaactctgcagatcctgatgttgcgttttgcaaaagcaggattatcaatttaaacaataattttgaatgtaatattagcgttgcatttagacttgctcatgagattagtcatattcaattctcacagcctactttcctgtatactttctccccgttcatcaagaacaaagaggagcgagaaactaatatacgggccattaggatgattgctaaattaatctataatgacgtaccgaatgaacgcagaaattgggctaactttatgagtgaatttaaccttcctagttggttcgagccattagttaaggaacttatttacgattgattattaactctacgtccaaatactgattgacgttaaaaaagttgtacatatttttggaggaaatattatggatagtaatcctgaaaccaaaccactcactatacttgatataccggaagaaacacgatactggtttgttcgagcaaatagtcaggcacagtattataccgactttctgactaataattatgtatcgatcgatttgaacggcgtgtccctcaacgatcttttaaatatttctcccgcaatacgagcctcagaagatgcactgctacaagcgtataaaaatattttccaaactcatgacttaaaacaatttgatgaaaatccatcaaataagaaaaaagacgatacaactagaaaaaaagatcgaacatctgaactcactagaagttcaaatagagctactagagcttttcattttattgaagattttgatattggggactttattgttgttccttataagtcatcaattaaattccttataggagttgtaacttctgacagtttcaccaaatctatcgatcatactgaaatattagatgatgatggacaaatgatttatgatgtttcacctttcactttaaagcgccgtattttatggataaaagaactgccaagaaaaaatttcccggataagctttcttggattaaaaccgcacatcaaagtatatttgaatttactagtaatgcaaatgagcttaatccatatattaatccattctacaaatataaagaaaactattacatgaggattggcgtaaatacttccgaaaagataagttcatctacttggttagaatatcaacttatggtgaagaatattcttggggaaaacttagacgatgtgtatcaaaaacaaaaagttcaatctcctggagatattattcaatatgtgacccctcagaatcttgcacttcttattactcttttcaatggattatttggtgaaatagaattccatcatggtgacaataccgtaaaactgcaaggggttataagatatttttccaaaaatgaacgtttaaaaagacaactcgaaatcataaataaacaaattaaagaaaaagcaagcgaagctgaaattgcaaataaagatgctgatactctgacaaagttagggcaattacccaataataaaagccagcaaaaatcaattaacgacgccaccagccgcattgctaattcaattgctcaaagatactccgaaaatagtaaaaaaatagaaaaaaacttttttgaaaaagaacaacctgttacgcaaataattaatgagtcatttgatgagactcaagtcgaagttgtaaaggataaacttaagctttctaacgagaatctcggaacacaaattccatatgaaagccaaacggataatttgaatccttcagagggcgaatccgaacaacaaacactagaaacaaatagacaagaaaacaacaaaaattttggctctgaaactgaaaaataatcttcaatagtaagactagcgaaataaaaaaagctgttaacgtagcatagccccatatgatttgcatgaatttcaaaatattcacctctaaatgaattatacgccattaacaaaaaagccacatcccctaaccgccaagtaagatgttagaacgtgattggccgatcattgcagctaacatccctggtattttcttagggttttttacattctataccgcgttacattaatactttatttacaaaggagcgaatagtttatggaaacgagtattatggctatcattggaataattatattttttattggagcattaataataactcttggtcgaactttaaatatcttacgtttcttttttggtgatcgtagtatgtttacacagatgttttgggggattatctttatctgcattggcttatttttaatcatacttggcagccctcagcttaggtaatatcttttccccactccggtgactagatacagtccgactctgtatgtgggaattatgtccaatattaattgacgtataaattacactaacttaatactgaatagtaactcaataattacgatagattgaagagattattaaaatgaaaaagataaattttattatgttaggcttaaccattttcacatttacttccatagggcttaagaaggctactaacaataatgatgtagaaactgatcgtataaaacatagtgtatttcataaaaaacgtttatctttcaaaaagagaaagtaataactctacttatatattaagaatcaatatacgtaatgttgtacaactttttagttagtaaccgttgtaaaaacaagaaaaattgaaggtaaggatgcttgttaggaggataactgtggaactctttattgaaggaaaacaacttaaaaatgctcaaatcagttttgacagcaataataaatttgatggtttcagtgtgccagttagttttgagaatgacgctaagttattatctgaacttaccaataaagctactggactatataacggacagaaaatagatatattgagtattactaaaatagaaaattttatgtatctagtacaagcaagattatcgaacagtagaagctaaaaatagaaatatcaaattactatggtaggcatacgattaatatggttgataacattattatgtatacaggattgggaataacaattattggtttattattgttagtatttactacaaaatgggtcaatggctggtttataaattacaaaactactaatcgaccacttgcctttgttggctggattttattgttgttaggttttgcagtctttatacttccactttatctaagtgggagatgggattaaatctttaagcagccgattaaaaagatgccgttaattttaacgagatgttagatcagctcaattttgagcatattgaaaaagacctatccaattctggataaatctttaatcagccgagttttcgacctattgaaaagatgtccccaatttgggggagatgtttcatagtagacaggaattttcccgcttaataaaaataggtgcttagttcggcttaaatttcagccgaatctatttttgaattgagtccttatagtagatcattaacagagatgtactgagccgaattttcggttgagtaattaatacatagatcttaattatcgtacttatcaagggatgtactgaacggatttctccgcttagcaagtgctataacaaggtctgccgaattttcggtcaccattacttttcgccgaaattggcgaataacatttactattactttctcccgaaattgggaatacgtccaaatactgattgacgttaaaagctgtacatattttattaggagttgtttttaagtgataaaagagtttaaagaatttatttctcgtggtaacgttctagatttagctgttggtgttattatcggtagtgcttttacatcaatcgtaaaagctctggttaactatctaattaatccccttattggattatgtgttggtggtattgatttttccgattggagtttcaaggtgtttgatgcaacatttaaaattggaagctttgttaattccgtcatcaattttttaattattgcatttgttgtattcctaattgtgaaattcgtaaataaattaatgcctaaaaaggaagaagaagaagaggtcattcctgataataccgagctgtatttgaaagaaataagagatgcattagttaataaatcagattcttcaacttttaacaacgaggaacctaacaaataattattcgaggcaattatgctatcaaagattctttttcttattggagcaattcttttcttattggaccttacataataatattaggccaaactttgataattactcgtcctttttaaaaaaacaatagtataggctttcgcattttttggggtgttatcttcatgtgcattggtctaatactagtaatactttcgaagccttgatcgtctttacaagaaatatattcctaagtcgatcaagtctatctcacctatggttagcacgtctctgttcgattcagagagtgggagtaagggatggtgttcaatcatccctaatcattgctaaatcactatcatagtttaaagcctccgcaagcttccaagttatggagtgatcaaaatggcaaaagtacaaaagtatcttgataaaaacggcaacaccaaatacatgtttcaactctatatgggaattgatccacagactggcaacaagaagcgaactcgtagacgtggttttaagacaaaaaaagaagctacccttgccctatcccgtttgcaattggaattagagaacaaaagtagcttgcctactgaaaacaatattttatttagtgaagtttattcggaatggtacgaccaataccaaaacactgtacgtgagagtactctagcacgaactgatggcatgtttcaaaatcatatattacctgcgttaggcaataaacgaattagaacgattaccatcaagcaagttcaaagcgccgttaataagtggtttaagcaagtctcacagaactataaacgttggtatcattataccactcaagtatttgaatttgctttaaagcgtggttacgttgtctctaatcctgccaaactgataaccttacccaaacggcaagaagccagtggcgacaaggactacaatttttggaataaatcagagttgcaacgtttctttgaccatatcgataaagataaagagttggagcgcttcacattgtttagaattttggcttttacaggcgttagacgtggcgaatgcttagctcttacatggaatgatattaatttcactgattccaccctgtcgattaacaaaacccttactcaagggatgaaaggtaagcaaatcattcaagcgccaaaaactaaagccagtagacgtacgattgatcttgattttgaaacggtggccactttaaagagatatcgagtttctcaacaaaaagagtttcttatacgtggatataacaccatgcaaaaagagcaacttgtattccctaatacgttaaatggctataagtccttgaacacaccgtcaaaatggcttcacagtattattgatggtatagatatcaaaccgatcaccattcacggctttaggcatacacattgctctgctctgttctctgctggtgcaagtattaaagaagttcaacaacgattaggtcatactgatgtaaaaacgaccatggatatttacacgcatgttacccatgaacaaaataaagaagccgttcaaaagttagtcaattatcttaatttttagacaaagggaagccaaacgggaagccaacttaaaattaaaagccctgtaatgccctataaacactggtgttaagccactttgctaaacaatggcgtcaaacccgttcggatccattgataggttacagaagtgtttaaagagtaccaaagtgaataccccatggctttcagatgtatgtatctaaaagtcatggggtattttatactctataaaaaattcattactatggcaacaatataggcagtttacgaccatatccaacccttacacccgttataattgctgtttctccactacctatagtttcccctattaatccaaatcgttatccaactttctgataactttcgctggcactcctgctaccaaacagttatcaggcacatctttagtaacgaccgcacccgcagcaaccacgacattattgccaatcgttactcccggtaaaattgtacaatttccaccaatccaaacgtcatttctgatggtaaccggcgttccttgcgccatcttttgtcgacgttgcttgggagacattggatgattgaccgtagcaatcagcgtattgggtccaatcatgacataatcaccaattttcacgggcgcaatatcaagaatcgtgacgttatagttggttagaaaatcctctccaacatgaatatttttaccgttatcacaattgaaattaggctgcacatatacgtttgctccagttgaaccgaataaatccttaattgcggcctgttgtttttggtcatccgttggatcgatattattgaatcgcgcgcacttgattaatgctgcttgcttaagattggcaacttcttcatctaaaaagcaatattccaaaccttgttttaacttttcaatctctttcatttgtttacctcattactaacctagctgaatgtgagcatctgccaaagcttgctcaacaactcgaagcacctcttcactatgttgaagacgtagagcggcctcttttaaatccttttctgcaataattcgttgaaatgctttgaattcttcatacatgcgatgcgaattttgtttaaaatcaaatttttcaacccctgctttactttcaatatcgaagttatcaagaacattggttgctccattcacaactactgaacccttcgtaccttgaatcgtcgaacgaatcgtagccgtcgagtctttagctccgatacaaaccactttggtatcaggataatttaagattaatattcctgaagtatcgatatctttttcaatattagctagatatttgacgcttgatggggcgcccagcagccccacaacaaaatgaatgttataaatattgatgtccatcaaagccccaccaccgaacttggggttaaaagctggtaggacttcacctgctttaaaagcatcatagcgagatgaatattgcgaatagttacattcaaccaccttaatttcgcctagggttggaacggcttctttaattttttgataattcatcatatattgattggtgatagcttccagcaaaattaattgctccgtttgggctagttctgctaattcttctaactccgctaaattcaaagtgaacggtttttcacagataacattcttaccggcttcgagggcttttttagcaaaagcaaaatgtaaatgattgggaacagcaacatagatggtatcaatttcttcatttgcaagacattcatcgatgtccgtatatacacgatcaatcccatattgcatttgtaatttttccatattatctataccatgaggggttcctgtgatagcttttaattcaatctctggtaacaacggcgtcattgtaagaaagtcctttacaatcattcctgctccaacaattcctaatttcatcgcatactctcctatttatccttttaaaactcgcttttttgcattttcttgatgcctgtttctagcatttttatttgcaataaagtttcttcatctttaacaattttttctttaccgttgataattgtttcgtacaatccctcgtatactctgctgtagtctcccacttccgagacaaccttttcttcatggtattttccggaatcgtctaagtaggtcaatactccataatgttgtggcaggtcgattccaaaatcgggatggtctggcatgtaaaacatttttaaatgttcctcttggcgatctttggtctgtttaacaaacattccttttttgccataaactacgaaacttggtcgttcctttattctgaaataactcgatttaactgaaaccttcatcccaccatagaagagatccaagtcgaaataatcgttcatccgattttcacctagtagttgtctaacctcatagtgaacgttatccggttctccgaagtatgaaattacttgatcgagcgtgtggcaagcatgaccatataaatagctggtatctagtgaaaattcgtttaccccttccggaacctcggggcgatagtaatcgtagtgcatttccacctctaaaatatctcccaaaacgccactttcaatcactttttgagtagttaagaaatctgaatcatatcttctattctgatagcattgaaccaacaacccttttgattttgctaaatcaaatagttcttttgcttcttggtatgtttctgtaaaaggcttttcaattaacgcatttttaccatgttccagcactgctttaccgatttgaaaatgcgagctactgggtgttgatactacaaccagctgaatttctggatcattataaatgtcattaatatcggtggtataatgtacgccttcgattcttttccacgcagttgttttcgtgcgggaataaatggttttcactttaattttgtctttaagtttgagtgaaaatggcaaatgataacgattggcactttttccatttccaatataagcaattgttagcatcttagttcctccatttgtattcaaatattgctttgctatctacaatataaaacggggaacttttaaacgatatactttagggtaattctggataatactttcagaaaaatagaacttgtactgcttattcctaaaaaaaattaccaaaatcatgctgaaaatattttttaagctatactgattatgaataagccaaaaggaagtgagctatcatatgctattaatcgacaagctgagcaaccacgaaaactttaccaacaccgagcaacgaatagccgattatattcttaaaaacatcaccgacattccgccgatgaatattgataaactttctaaagtcacttatacctcgcattcagctgtggtccgattgactaaaaaattaggtttcgaaggatttaaagattttaaagtagcaatttcggaggctgtgtacagtaaaaccgccaacataaattctgttgatgctaactttccgtttgattctaacgattctttctctaccatttcaaagaaagtcgctgaactctctgttgaaagtattcaaagaacatttgcacagttagacgaacgactgattgaagaagcagccaatacgattgctaaatcggaacgcattttcctatttgcgcagggtgactctcagattcgagcccgtagcttccaaaataaattggttaaattaaatcgtttcgccattttgggtgaagaatacagtgacgaagactggacggctgccaacttaactaaaaaagattgtgctattttcatcagttatggtggtcgtatttcacaatatgaacgtatgctaactcatttttccgagaataaaattccttctgtagttctgactggcaatcaaaaatcgcccctcattcgtttggcacaaactgcgatcgtcactactcaaaatgaatatgactttttaaaaattagtacattttcttctcagatcacttttgaatacttattggatacaattttttctgttatttatgctaaggagtaccaacaaaatattattaatttaaaaaataagtttaacttgattcaacatggtactctttctgaaggcttagctaaggaacatgactcaaagtagtgcgtaaaatgattcaaaagactgttctaaagagagaacaagtactcatttctatacaaataattacgtccaaagtccaaaaatacgcctggtagtttccagacgtatttttttgagaacatattttagataatgtaatcacaaaattgaactaataactttagggaatcagttcattcatcaacttgtttgttaaagtcgttagttgatcccactcttgatccgttaaggtagcactaatgttacaattgtgttgcaattatgtttcaataagattattatatgtttgttcaaggacaactaataaataatatatagaaatggaattaattttcctggggggcattatcatgaaaaaaggatttattattgctacagtagccatgagtttaggaattattgcaccattatcacaggtagtcacctcaataccagtctccgcaaaaacaactagccattcatatgtaactacaacaagtaattctatttcagtaactaatatcagaaaaggatccacagtcgtactcaaaaataatatgggacaaactattgcaactaaaacagctgctaatgctgggacagtcacatttaatttaggaacacagcaagtaaaccgattaactaagactgacactttagcaattaaactaagttctggatataaatttaatatcaattttaatttcattaattatagaaccccagccagtaataaatttgtagctgggattccaactgaactacagggccattggcaagccaaattagggtatttcaccggtcattggaatatgaccagtaaccgctcaacattaacggttaatgatcctcaaattttaaataatgttcagtacaagaatttaggcaatcatacttatgtactaaaaggtactgaaagttattacagcaacggaagtactatccagtacacagttaaaaaggtaagtaacaaccacttaacattaaccactgctaatggagtatcacagtggtataaataatattatatggataaaaaagtctaacttatggaatcatcccactaagttagacttttttatgttcttactgaaacaagttgttctacgttttgctattcttcagactactaatgtgtatcctgattttgatcatcacgtggcttattttttgccaaaatatattgctcgattaaattaatgatttgttgattttgtggtaagtcagaatgttgagcatcatttcctgtaactgtaatttcagtataatgttgggcttggccctgataaatatatttacccgcttctgcgctccgtgctggtacaatcccatcattatcaaaattctgagtaccaataatcgaatagactgacaacgttttaggaattttttacgttgtttaataaagtctgacagcatctgagttttatgcgaaagtgacgtttctgagaaattataaggtgatccaatggtcattaatttcttgattgaaatatcgtcacgattgaaataattttcgagatacattgtatataccaaaccaccatttgaatgaccaatggccttaaaattattaaactgatattttttagctaacgcattaaatgcaatagaaaaccatttagcttgttttttaatattgctataaccatctttgttgttctcaaaaccaacaacaataaacggctcattatcacgtggacggatcgatcccgagtaactaatccgatcattagtatggaccgttacttttaacagactatggcgttttccacgcctatcgtttaacttatcaatcaacccatcaaatcgattttgcgtagcactactccccggaatgaaaataaccggtgacatatttgagtcatgtcgtttagaaatggcggtcacatttttatgcatccactgaattgatggccaagccaatattccaatccctatcaaactcgcaattaaaaatataatgctccattttttaacgttccgtggcatctagaccatctccctgaatattaagtcggttggataatttcacaaatggtcgatacagccaaacaccgattcctacgttaagtgccataaccaataaggttacccaattcccattggttccaataagggcctgcaaaagactgggcgttcccaacggcacttgataaactacagcaggcattaaatgtaaagcaatggcgcttgcagctattcctacgttaactagtggaactaatagaaatggaataatatatagaccatttcctaaaactggaacacccactaatatcgcactattaaagttaaataatactggcagcaacgaccatcggccaatcagctgttgatcacgttgattactgaacaaaaaaattgcaatcactaatgatagcgtacttcccgttcccccaatcgcaccaaaagattcatataacgtccctaatgaaaaaggatacggtactccccaaatcgtgtgatgtataagggcatagtttaaattcgcagtcattgcgacgccgttacgtccgaaatgtgccagtattggcatactggtcaacccgaaaaaagtcattatgccagccaatattacgatcgctacggaaaatagcaacgaggtttggttagcctttagtgattgtaatcttagaataacttgatctggtaaaaccgaaatcgccaaccaatttaataaaatactaaagcaaatcgccacaaccaacacaattataattgctcgtaatgaatctaacgcacgattccatgttactcctgaagaagatttatcctgctgctggctatttgccagatgcttaaaacttagtccaaccagatagcctaccaaaaaacctaaaaacaaacctcccatcccaagcatatcttgaccaaaagctaactcaccattatttgtataacgaaccgtaaggattaaataagcaattaaccccgttatactcgctaacttttcatctcgctgataccgtttagctgtataatgtgccatactaaatgcggctaaagcagctactattcctaacgttaaactcgtcaaatgatcaaaaataatttctatgaatcgataccgacttagccacgacgaaaacccaaaaattgttggcaataaactatttcgatttaacatagtgatttgaattagttgactgatactaccgataagaacaaatgggaataataaatttaaacttttttgcactaattggtataactcattttgttggagccgtattatttttcgaataatttgttctcttcttacccacattagattttccttctttaaactaatctctcctactattatctttattctagttgaatcattatcgaattgcacatcgcgttgctattatttatatctaacctgataaagttggttttaaaaaacacgtctggaactatcaaacgtgttttttaattaggtactaattcttccagattcattgatgggtaaaaccaaaagtttaaagctcgatctcttagatactcatcaatttcccattcgtcactctcccgtgcttcaaatgtatcatcgattcctcgagctataatttcagctaattgatacttacccgctggtattttatccattccaattaaatttgttgcagctttttttagttcatttaaattgctattagttttaatcatgattgtacccctccattattagattgcttacgctttcattgtataacattttcaaggaataactatcttaatatgaaactttccaaactatatcaaacaaaaaactgtagccgagcttgatcgccctgctacagtttttatcatctaccgtgtttcttttttcatcacatgtcctacgatgaaagtaattccataagatatgaataaaattacagcgacaatcatatatggaatgtgagtattgtaatccatcaacattccggcaataattggtccgatgacgttccccacactagttaaagacatgtttaatccattaattaagccttgattgtctttgccttccttagttaataaggtggtgatggccggacgtaaaacatcgaaggcagagaaaactactaatgtagcaatgattacttcaatttgagtatgagcttgggtaatccaaaaaacaaaaattgctccaattaagaagcatgccccaatcagtctcacttcacccattttccgcaccaagaaatcaaagataaacacttgcaaaatcaacgagaaaatcccattaaaagtcaatactagtgcaatcgttcctaaactaaaattgaagacttggttaacgtagatgctataaatactttcgaatccctgtaacccaaaggctgctacaaaaatcatcgtaaatagaattactagtggtgccgtcatgacactcttcaaagcattcggcttagtaaacttggtcatttccgtttcttctattttcacttcagtcttcggcattaccaaatacgtaaataatgttgaaaccagccctaaggctgcagccgcccaaaacggcactttataatggatatttgctaatacaccaccgagccctggtcctaaaattagtcccccactaaatgcggctgaaatccaaccaattaccttagccctttgcgccgtagtggtaacatcagatgctaaagccatcgacgttggaataaacaaagcggctgaaatgccaccaacaactctggatacgttaaatagtaataacgaatttgataaagcaaagattacttccgaaacggcgtagaaaaataatcccgctacaatcagtggcttacgtccaattttatctgaaactcgtccaactaatggagaagcgataaattgcgagaaagcaaacaatgccgtcataattcccatttgagtagtagtataaccgtaatgattcttaataaatggtgtgacgggtatgactagaccaatccccaaacaaattaagaagtttccagcaattaagatatataatgtctttctgtttttttcactcattgtaattcatctccttcgttatctgatacattctttcatgataacactcaatgaataaaaaagctcaagctcattacctatatcttacggagaccataattaccagtccaaattcaccttggtaatttcaccgttattaaaagctttaacttgtccatcatccaactttacgacgatatttccatactcgttaatatccgttgcaatcccctttacttgtttcgttccgacttgtaaggtaactggcttaccaattacgattgacatttttcgatactcggacaaaaagctgccatctaaataattttgccaattatctacaatcgtattaattaattgggcggcgattagattacgatcaatgttcggttcatttttagcaacaatggctcccgctttttgttgtaattcttctggaaattcaggcgtggttaagttaattcccaccccaattacaaacgcttgcgtagaagcagattctacttcggtaattgcctcagtaataattcctgccacctttcgtcgattcattaaaatgtcgttaacccatttcaatttaaatccacgttcagggaagaaatctttaaatgtttgtgcaatcacataggcaaccccagtagttattaagcccacctggttaatttcaaaagtgggcttagggataactatgctaaagtaaagtccttgttctttgggtgagtaaaaactacgtcctcttcgtccgtatccttgcgtttgctgctcgctaatcacagcaaatgccttttcgacttggtgagtagcgagatagtttttagcatacatttgagttgaatcgacttgctcttcaacagcaacatgatcaacacttttatttttataaaaattaatgactacttcatccaacttagagctactttcatatttgtaacctagatttttctgactttggatttggtgaccgtgtttctttaataggttaatatttttccaaatcgtttcgcgggtaactcctagattatctgctatttcatttccagatacccaacgatctcgatctttcaataattctaataaaactttttggcttgttttattccccatcttataaccacccttaatctatttaactagtttaagtgtactatcttctccaatcgattggctatgataattactaaaatagctttgattgtatcacctgggataaataataaagtagaaaatatggccgttgaaagtggcatgggtgcttgaatcgctaaccagaacgcaccaaatacatcaataaaaactgctcctccaagccaaacagaaagtaaactaagtattaattgattcttaattttgcctttcaaaacattcttgattaaattaattactagtggcgcaaacaaccaagccactaaatagcccccggtagctcctaaaaatactacggcaccacctaaaccaccggaaaggattggcaatcccaaacttactaataataaaaatattcctactgataacgttccatatctagtacctagcatgtcaccagccatcattactcccatattttgtaagacaatgggaactggaattaacaagagcggaattctaggcatcagccccatcacaatcgttaaagctgttatcattgctgctaaagtcatcatttttactgcactttggttgcttctctccatttttaaaacctaccttctttaattttgaaacaaattcattatatataatagtaacctatttttataaaacaaggttactattacagattttttaatcgattaatttcaaaatttttaggtctaaaccgtgttggagattactttttactcataattttggtgtaagctattcctttcttcattctttgacaaaatcttttcaattgtcacttctaaaattaatgatccacccgttgtacaaaaaaaccgaattaaagcagcattcaaactactctaattcggtttcggtttttaatttattaaattacatttcgttcaaaaggttggtcactgataccgtcatccaaaatctttttcgcccattctttagctgaaaatagtgaatgatcacggtaattaccacaactgtagatgtccgtacctggtacatcttcccacttagtaacatttgcgatttcttctagtgcacccttcaatgctttagcaacttctgtggttgtaggttctccccaagcaatcaaatggaaacctgttcgacatccgaatggagaacagtcgataattccatccattcgatctcgcaataatccagctagcaaatgttcaatcgtatgtagtcctgcagtgggaatcgcattttcgtttggttgaactaaacgtaaatcgaaattagaaatcttatcacccttatttcccgtttcaactgtaattaaacgtacgtacggagcctttacctttgtgtgatccaattcaaagctttctacttttgccataaaaacatccccctattcatcggtatctatgtcctattttagaccaactcgatcctgatataaattaaaaaattcatttaaaaatcgtcctggctaatgttatgcatcaaatgataactaaccatcattttttgcaaaggacggagattaacaacggggaggtaactaggcattctaacccgatcaaattcacgtccagttacatcttgatagatagaatataataacaaaatacatacaaaaattagcggaaatcctgcaaccgtacagattgcttgaacaacctcaaatccacctactataacaattcctaacgagaaaataataaacacgatgacccaagccattcgattccatcggctaggttggcgaccatgcgacaagtctagactggtgaatgatgaaacaataaatgcggaagaagaaatcgtcgttgctaagaagataaaacatgaaacacagaaaagaattagcatcaatttattcatcggcaaagttgtaatcaatgctgcttgaactgctgcttgtccttgtgtattcaaaatgtgcacgatgtttaaagtgcctgattgttgaagccatagagcatagccccctaaaactgcataaaatgaaatacatccaccgactccataagtcatcatccctaaaacaacttggcgaatcgtcttaccatgcgagatccgggcaataaataaccccattaccggcatgtaggctaaccaccaaccccaataaaacagggtttgatgttgagcaaaaccattggtgccagcattagctttattaaaggaaagcgcagtaaaatgttgcgccattaatttcaaggtttgaccttctgagcccactaaaaatttagttggaccagctactaaaacaattgctaagaaaataattgccaaataaatgtgccatgctgatagttttttaattcccttatttaaacctgcgtacacggttaacgtaaataaaatcaataaaataaagaataaaaatagttttaaataaatcgtatctttaatacctacgataatacttaaaacacgtgcaatcacgggaatttccattccaatcgaagaaccaattccgcccatgatcccaaaaacgactaagaaatcaattagttgacgtaaaacttttttatataattgatcgcccttcaagaggggaattacagtacttaatcgcattactggaattttttttacatacattgtataagcaatagcaatggtggcagttgcaaacatcatccatgccatcggcccccaattaaactcgcccactacgttagcataggcaaacgcttgggtcgataatggcttcgcgccaaatgccgggtgctgaaggtattgcaatggatcagttgcacttaacatcaaaatacttgcatcaattgcagttgcaaaaaccatgcttccccattgaaaaccactatagtctttagctggatcagcctttccgaatctgattttaccgtatttactaaaaatcaaaacgataaaaaacatgaaattgatgacataaattgagatatacaaccactcgtatttgcttgtaacgaatgacaacaacgcgttcattaattgctgaacggctgggccgcctgtgataaggatgattgatacaaccccaaataacaccattgttggtaaaaagacagctcgatcgacattcttactgtgtaagataaaaaattcctcccatattttcaaaaaattggtacaaaaaaagcaacaccattggcgtattaagttcacacctgcatagcgttgctcgatcggattgctccgaaattcgtcatacctgttactttcatgttactactattaatttaaatatcaaattaggctagatttgtttgattactctggcaggattccccgcaattaccacattgtccccaaaactctttgttaccactgatccagcacccacgacgacgttattgcccaaagttaccccaggtaaaacggtcactcgtcctccaaaccaacagctattaccaattgtaattggagcacctaattctacatcagcatttctcttaacgggatcaagtggatgaataggagtatacagccccacgttaggaccaaaataacagtgttcaccaatcgtaattggacacgtatcaaggaaagtcatatcgtagttgccataaaaatggttaccaatgtgaatattccatccataatcaaatttgaattcactctcgacaaagaaatcgtcacctacatcacctagtagttttttaaaaccactattacgtttctcattgtctgtttcgttgttaatcacttgtaattgttgacggatgaactttcgacgaccaattaattcagcatcaaactgctggtaaggttctccagcagtcattttttctcgttcagttcttgtcatatttacgcgcttccttctttaaattagcccttcttgttgcaaccctgcctgcgctaccaagttaataaaattaaatggtcgatcgtagtatggttggaataacatatccacaaatgctaaatctttcagcgtattttgattctgaattgctaaagacattgtattagccaattgagaaacattatgttcactaaagaattgggcccccagaacttttaaattgtcctgttcataaacaattatactgtttattttttccgttgtcggcataaattctggacgataattgtcctcatagctgatatatttgacctttaaaccagcatctaaagctcgttgataggttaaaccggtagtagctaatgtataaccaaacaattgtaagcctgatgttccttgcgaacctatttcaggccaacgattaccgaaaatattaataccaactaatttaccttggcgaatcgcattcgtcgccaatgggatatagctatctgtatccgtcggattgtaatgtacagtacgagcatctcctgccgcgtaaatatccggatcagaagtttgtccatattcgttagttaaaattgcaccattacggctcattttaacctgcccctctaacaaattagttaccgggatgaagccttttgaaacaatcgctacgtcaacttcttcattttgatcatgaatggtagtaaccagtaaggagtccttttgatccgtgaatgatgcgactttactattaagtttaactttgaccccgtgatcttccaggatttcaactaacattttgctcagctgtacatccacgtaattatttaaaatcacatcatgactatggtataaggttacttgacaacctaaatcagacaagctttctgctaactctgcgttaacatatcccccaccaattaatgcaactcgctggtggggttttaaaacttggtgtaaagtctgcgcttgttcatagtttttacatagcattactcgtttatgattaatgcctttaattggaggtaaggtcactgctgaacccgtgcacatcactaatttatcgtaatgttcgcgacgaatactatagtcttccatgttttgtaccaaaatctctttttgatttcggtcaatttttagaacatcatgtcgcaggttcacccgaattttttctaaacggagatcctctgcatcatcatacatcatgtcttctagccgttttacgcgaccattcagatacaatgcgattccacatgataagaaagagatattattattacgttcataaatatctacctccgtatccggattttgtcgtaagatttctctcactgctgctgtaccagcatgggtacacccgatgattgctactttcattttgcctcctacttgttttatactggacttacttgttaagaattttttacacgattccagatgctttatattttaattttagactggattaagactttgtaaatgttttaataaggaaaattagcaaactaaccacgccaaatttcaaggagtttacttaatgcttagattttttatccaaccgcagttaaatacgattgttgattcagtaattggttacgagatgctgatcaaagaataccgcgatgggacctggcgaatgcctgcttctttttcagcaattccagcccatgatatggcagaattactgattgcaactgctaaagaactatctcttaaagttggttcagtttcatttaatgttgatcgtaaccaaattcttgatgatcaactaattcacgctttaattgccgcccagacggttttacgtccagttaaattaattatcgaattaattgaaaatgatgttaaaccctcggtgtctgatgagcaattaattgaagttgttacgcaattgaatgactttggaatccaattttgtctcgatgacgttggtagcggaattaatacatggcctgcagttaagcctctactaccatacactcgtgaacttaaatacgctctccaaaattataaagagcatttggatgaatccgccgctgaaaatcacgttaccttttggcaaaacctagcaactaaacatcaaatgcgtttcattttggaaggtatcgaagatgataatgatgatgcttgggccgattctatgaatatcgatttacgccaaggatactactatggccgccctacactaatgaaaatacatcccgatgatcccgattaacttatgtaaagaaaaaccgcgttgcgagacacaatcgtaacacggttttttatttagtttctattcgatttcaattccggaagtcttttcaccactggccttaggtaaggtaattgataaaactccattatcaactttagccttaatatcttcagccttaactcttggtaattcgtaacttctccgcataataccatagcttcgttcggtcatcgtaacattatgcttttcatcttcatgatcagcaaaactatctttcttcacttccacatttagcacgccatcttgataatccaatttaatatcttttttatcaattcctggcacatcgattttaactttgtaatcagtatctgattcactcacgtcggtcttcaatgtttttgaggttccatcccagccgttgttgaaaaatccgcgcgataaacggtcaaaaaatggatcccacatatcattcctacgattcatcatttcattagccataaaaacaaaacccctttctaaatgattggtgaagttcttcgcttcatccttacacctataatgttagtcacattatagtattatgtcaattactttactcaagaaaatgttttcaataaaaaaaggcttacccaagaacaagatattgtccattgcataagtctttatctataattgtagatttagttttcagtattgattctttctgggaaccaaatcttaatttctttttcagcgctttctacactatctgaactatgaactacattcttaataggaccaggtccccaagctctggcaaagtcaccgcgaatcgttccggccattgcttcactcggattagttggaccagccattttacggaaggtgtcgataatttcattaccttcagcaataatggccacaattggaccacttgtcataaatttttcaatgtcggcgtaatatggtttatctactaattgtgagtaatgttgacgtaactgttcttccgttgcgtttaccatctttaaggctttgatttcataacgacgattttcaattcgtgaaatcacatgaccgatatgtccacattgaactccgtctggtttaactaaaattagtgatttttctgtactcattggcaaatcccccattggttttatatgccaattatatactagagaacgcctagtttacacgtaatatggaatgtaagccttttactaaaaaaatttttacttaatctttaacgccaacgcgttcaatgccacaataacggttgaaagtgacattaacaccgctccaactgccggactaaggacgaatccaatcggagccaaaattccagctgctagtggaattgcaaataagttatatccagctccccaccagaggttttgaaccattttagcattggttgcttgagctaatttcaagaagttcaagatatcacttggatcactgtgcacaaggactacatcagcggaatcaattgcgacgtccgttccggctccaatggcaattccaatgtttgctttagcaaggctaggcgcatcgttgatgccgtcccctaccataattacttttccttgctcttgatatttttcaagtgcctttagtttgtcttctggtaataattctccatgccattcatcaatttgaaggcttgccgcaattttttgcgctgtttgttggttatctcccgtcaacattaccggaatataacccaattgctttagttctttaataaaggaaactgcattttcctttatttggtcgccttcagctaatccacctaaaacttgattttctcttactaggaatgaaactgaattaccagctgtgctccatttctcaaaatcatttgtatcaaacttaatctctttttgtttcaaataagaggcgttcacaatctgatacttctgaccttcgattgtacctgttaaaccaatccctttttgagctgaaacatcatgagctgttttaattgtttgcttcagctttttagctgctgctttaataccagttgctaaaggatgatcggaatggtcttctaagctagccatcagtgctagaatatcatcttggtttaaatcgtcagcataactcttaactgcgttaaccgtgaatttaccttctgttaatgtaccagttttatccattaggacgtatttaacttttttagcttcttcaatcgattgacggttacgaactagtaaaccattggtggccgcaatactggtacttcgtgcaactactaatggaattgctagacctaaagcatgcggacaagcaataataaaaaccgtcaccattcgttcaaatgccacatccaagccttgtggtaaccaagccacaaacgcaatcacaccaacaactagagccgcatagaataaccatgaagctactttatcagccaaactttcagctttggatttagatttttgagcgtcactaactaacttcattacttgtgatagatagccactttcgccagttccagtaaccttaacttcgataactccgtctccgttaactgctccaccaattacttgactaccttcttttttatcgattaaacgtgcttcaccagttactaaagattcatttactttagttgaacctgaaactacgtcaccatcagttggaatttgttctcctgcaagtacgcggaccgtttggccaacttcaacatcgctcaaatccatatccatgacatgatctccatgtaaaacatgcgcttgactaggtaaaagtgcggccattttttcaactgcagagcctgcggccatcactgaattcatttctacccagtgccctagaagcataattacaattagtgttgcaagttcccaaaagaagtccattacatgaccgctaggattaatccattgattcattataaatgcataaagcgaatagccgtatgctacggtaattcccatcgcaattaaagtcatcattgcgggtgcttttgattttaactcactgactgccccagtcaaaaaaggcttacccccatagaagaataagaaggttgctaagattaagacaatataatcagaaccggtaaaactaatcggcaatttcaagtcgccaattctaaaatccattcccataaatggcgataataatagaattggaatagtagcaattaagcttacccaaaataattgttttagattccccatgtgcatcatatgtccatcgcccatgtcgtgcatatcatgttggtgtccactcatctcatgatgcatctgggaatgatccatttttgaatggtccatgtgctcttcattcatttgcttatgattcatgttacatatcctccatcttacaatccatatcacagtcttctggcaaacaattacagctcaccttatccggtgctgtttgtgccttttcctccaacttaccaattaacatttgaatgtcacttttagataattcaatttgatcaatcaaattagctaaagtagttcctaccttatgttggcaaagatggacaaaaagggatttagaagcattatccattgcaacttgttcttcaatcatgggctgataaataaattctcgcccatttttactggttcttaaagcccctttttttactaatcgccctaaataagttttagtggtggaagctttccatcccaacttctcttccaaaatttcgataatttgatgactcgtagccttttggagcgtccatattactcgcattgtttcccattctgattgactaatttcaatttcatcactggtattcaaactatatcctccaatctgtttacaaatgtaatctttaaatatagactacatttgtaaacttaaaaagtcaagaaaaaagacctcgatttccatcgggtcttaattaattaagatgaagttttaattttattctagattagttcttgagcgttgaatgataataatagctatgataactaatactgcaccgattaattctacgacgttaaaaggatggcctaggaatagtaaactcaacacaaaagtcacgaccggctggacagcatccaaaatacttacaacggcagatggggcaaatttcaaactgtgtaataaagcccagaaaggtaaaatagttcccactagaattaccgttgccattgaaagcattaactgtggtgtcagagctggtgtatctacccaaactggttgatgaatattaaataatatactaccgataattagtgcccatcctaaaacaatcattggaggatggtttttagttactggtttaggaagtacaacataaaatgcagctgtaattcctgaaagaattccccaaatcaatgctttattagaaatagctagttcatggatgtttccatgtgttattgccaagaaaacacctgccattgcgatcacgaaagcaatcacatcgcttcgcatcgggcgaacacgctgaaatactaagctccccaaaacaataaataaggggcttaaatactgaagaatggttgatgctgacgcattaccttcttgaacactaatatagaaagttaataaattagccattaaaccaaaaatagcatacgctaacaaccataaaacggttttaactgatttaaaaacatcaaaaatttgcatccgatacttaataaaactgataacaattaatactaaaccagcacctaatgttctagcagataaaaaccaggaagctggaatactctctccttgagaaatgacttccaataccgttccagaaattccccacatacaagacgctaaaagggcccaaaaaattcctttaccaatatgcttgttcaaaacttctttttccatcaaaaacctcacatacatttttctaatatatttaagtatacctaaaaagctataggccataaagtatattcgtgtcacatttcctaacaccgtgtatttttttgctaatataaaaaaacaggagtaatctcctgcttttattacattttgataattattcagttgttcccttaataatttcaaggattgagttgatgtgttctagagttttaacaaagtcgtcttttccgaatttgctagcaaccacatcaagcatttctctaaaaatacggtcattttcctcatataaatcgattcctttttgagttaatttgaggtatttttttcgacgatcttgtttatcattattttgttcgactaggccaaggtccaataaagttccaatttttcttgaaatggcactcttggtaacctcttgcgcatcagcgattgagctcaatgtaattgcttcaccatcagcttgcttaataaaatgcataatcatgaacatatcgaaagatacttgtggatctgacattttactttctaaaagcgtaccgattagttttatacttttgttatacgtttgagcaataaacgtaatatcagcttgtttcattttcttcctcccgattctagctttcccagccgtttacatagttaaatattaacagactcacagaacttgtcaacgcaaatattaattattgatgacatatcgtgttcttttgttcacttacttttaatgaatgaccctttaaaacgagtaattgttctactaatacttattttaaaacaattgtgaaggtaatatcaaattcatattaaaacgttttaacccttcatactaagaaactatgatactttacccatatcatagcttctgataatcctaatataatttacttacttgttcttggatagcatcatgatttaaaaactcatcataagttgtttcagcacgatcaaccgaacctttatcagaaacttcgataatatgatccgcaattgtttgaataaactcatgatcatgggaggtcatgataatagaactcttgtaactagtcaatccctcatttaatgcagtaattgattccaaatctaaatgattggtagggtcatctaggattaaaacattagccttgctcaacattgttttcgaaatcatgcagcggactttttctccaccagagagtttagtaacattttttagtacatcttcccctgagaaaagcatcttacctagaaaaccgcggagaaaagtattatcactttcttctttaggtgcatattggcgtagccattccaaaatatcaaaacgatcgtcttcaaaataactgttaatatcacgcggaatataactacgttcagtagtttgtccccaggttactgaaccgctatctggttccatttctccagctagaatctgcatcaagactgttgtagctaagtcattttgactcaaaattgctgccttctcaccagggcgaacggtgaaagtaatattatctagaattttcacaccatcaatcgacttgctaaccttgtccacccgaacaagatcattacctaattcgcgggctggttcaaaacgaataaaaggatatttacgtgaagaaggtttgatatcgtctaaagtaatcttatctaattgcttcttacgggaagtagcttgtttagattttgaagcattagcactaaaacgagcaacgaattcttgtaattctttgatttgttcttcttttttagcattagcattttcacgaagacgtttggctaaagcactagattccatccagaaatcatagttaccaacgaaaagttcaatcttaccaaagtcgacatcacacatcatcgtacaaaccgagtttaagaagtgacggtcatgggatacaacgattacggtatttggaaagtcagctaagaaatcttctaaccaactaattgattttggatcaagtccgttagtaggttcatctaaaatcaaaatgtctggttttccaaacaaagcttgtcccaaaagcactttaattcgttgaccttcggttaattcgctcatcttactgtcatgcagactttcgtcaatgcctagctgttgaagtaattgtgatgcttctgcttcagcattccaaccatccatttcagcaaattcagcctctaagttagcagctttcatcccatcttcttcagtaaaatccgctttagcatataaagcatccttagcttgcattacctcgtataactttttataaccttgaattacagtattcattacggtaaattcttcaaaagcataatggtcctgatttaaactcgacatccgttcattaggcgaaatactaacgttaccagaagttggttgaagtttaccttctaatatttttaaaaatgttgatttaccagcaccattagctccaataattccgtaacagttgccgggagtgaattttaaattaacatcgctatacaatttatggtcagagaattgcatgctcatatcatttacagttatcatttagttcctccattttgtagacaaaagaaaaagaggcaaaacaatgtcttgtcccaatttctaccagtctgtttaatttaacatacctactatccttgaacaaccttattgtttaggatatttaattaaaatggcttttatattttattaacacacaattttttagtccctctgcattaaagacaaagggctcactttaaccatttgtatgtcacccattagccataaaaacttttaattttttagctctattctgctgacaaagcttcgactgggtccaattttgaggccttacgggatggcgtaaaggccgccaatagactaataatgatactaatcgctattccaaaaatcagataacctggtgcgattccaataatcgcaaagtcgatatgcttcatagaaattacgttagctccccattgagctagcaatgcaaaagctgaacctaaaatacttgagaaaagccccaagaagaatgcttctgaaacaaagaggttacgtatatcctttcgacgcgcaccaatcgcccgaagaatcccaatttctttagttcgttcagaaacgctgatataaagtaccacaataatcataattgctgataccaatagcgagattcccgcaattccagctaacacatagaaggctaacatgatgtaagtattcaatgaatccagaattgcgcctaccccagtaattgtgtattgggggcgttctttacccttaacatcatgcttgtagttcttaattttattttgaacgctcttaacattctgagtgttattgacgttgactgtaaagaagttgggctggtaatccaagttcttatctttaaacatttctttcaacgtattatagtcaatcgcactcgttcccgaggtaattacccctgaaactgtaacttctttttggagttgaaccggttgttttttactatccacggtcgtcacgaaaactgtaattttcttacccacaacgtttttatactttttatcaaactttttagctgtagctttatctaacaggatttctccattactaggcttgctaccatatttaatatcaccttcacgttcggtcttattccatgtctgtaaaacttgcaaactaattgattttttaccagcgaccgtctttgcagattgaacatagtagccgcgttctactgatttaacattctttatcttattcattcgttggtaatctgtgtttgatagatctgctgtttcaccgttttccatttgttcttgggttacatttttagcaacttgaacagccgttggattgatttgtgatgaaatttggtcattcatataacccgtaactccatttcccaaacctaacattaaaataaccgagaaaatcccaatggatgccccaaaaatgattaacaggtttcgtttgagattgtagctcatatgtttcaaagccattcgtaacgaagcccagaacgtcaaatgtttagggaccaacgttttttcagcgtcagggactggataagccgcccttaaatcagcctcaccatgaattactccgtcatccaaatggaccactcgtgtaccaaaatcggctacttcttgcgaatgcgttacagcaataactagttttccatctttagcaatagattccaaaatttccaagacttctttagtattttgactatctaaagctcccgtaggttcatcagcaatgattacatcagggtctccagctaaggctcgcgcaattgccacccgttgtttttggccacccgagagttgattaggatgctttcgcatatgttctttcaagcctactcgttctagtaatgctttagcccgttctactcgtttagcatgagaaagtttcgtcatttccagagaaaccattacattatccaaaatgttcagatgactaatcaaattaaaactttggaagatgaatccgatattttctcttcgataagcatctaacaccttaggtttagccgagcgtaatgattgtccattatagacaatatcaccttcgtactggtgatctaatccaccaatgatattcatcagggttgatttaccaccaccggattcacctaaaattgaaacgaactcgcctcgatcaaattgcagattgattccttttaatactttaaattcttggttacctagaaaataggatttatgaacatcccgaacctctaataaactcatactttcctcctatatggtccttcagtgattatttggagtgaacttgttggaaatgtgttgggtagaaatatttctctacttccgtcacaatcaaaacaatgattccggctatcactggaattaaccattgtgcccatcccatggaagcagtgctaaagattgactgcatgaatggaacgtatgttaaagcaaattgtaacaccaataataccgcaattatccaaaaagcgtgtaagtttctcaaaatatctttggagaacgctggcttaggagtccgtagattaaatagatagaaaatcttaccaaatacaatggtattaaccgtcaccgtacttgccactacttcactaactccatggtcaattaaccaatcgtaaccaaaaattcctaatccggcgattaagatggaaacataaacaatttgaattacatcggctcgatttaagaaggatctgcccgctggacgtggatttctatccataatgccctcttcagcaggctcgaatagaaatgcaaattggattgtaatggcggataccatattaatccacaataattgggttgggactaatggtagatcttgttgcgctaggatagaaagtagaacaatcaacccttctgcaaaactggtcggtaacaagaaacgaatcgtctttttaatattatcgtatactcgacgaccttctttgattgccttagttaaggttgcaaagttatcatccgttagcaccatgtcagccgattctttggcaacgtctgtccccttcgttcccattgctatcccaatgtcagctcgttttaaagctggagcgtcatttacaccatccccggtcatcgccgtcactaaattattagcttggtaagcttttacgattcgtaacttatcattaggggtggttctcgcaaagacgttgtagtcttgaatgatattttttaactgttcatcatccatctcgttgatttcggcaccagtaattgcagcaatctggtcatccaagcccagtttttcagcaatcgcggaggccgtctcaggatgatcaccagtaatcatttttaccttaactcccgccttttgcatctcatgtaacgctacaatcgtttcttcacgtggtggatcaatcaatcccgcaattcctaagaactgcattccactctgtaaatcttcatgtacaatcgtttctttattatcttcaacttccttataggctactgcaactactcggtgccccttttgagctacttcagaaactttgttgtaccaatattgttcatcaaaggtagcatcatcgattgcggccattctaaaaatcttatctggcgaaccttttactaaaattcttcgctgcccttcaggactctgacttagttcagcaatgtaacggtaatcagagtcaaatggaattttatcgatttcttcccattgcggtacctgctgatgaaacgctttgttagctagggttaggaatgcaccatcagttggttccccgttaattacccaggtaccattttccttagacaagatcgtgtcgttagcttcatgcccagcaataattaacttccgtaaatcttcatgctgatggacatcaataacttggttattaaacctaatttcaccatgtggttgataaccggtccccgtaatttcataggttccttgcttggtaatgatttcttcaatcgtcatttcgttcttagtaagcgttccggttttatcagtagcgataacattaactgctcctaaggtttccacagatggaagagacttcatgatggcattttgttttgtcatcttccctactcccatcgctaaaacaaccgatgtactagcaggaagtccttccggtaaagaaccgacaatcatggtaattaaggcgattactaaaaccggtaacgaataaattttagtaacaaacccgtaaataccgactaagatcgctactacgataatcgcgtacgaaatatacttacctagtccattaatctcacgcattagtggagtagttttagagccaacctcttccacacttgaactaatctgtcctaattcggtatcggttgcggtcgctactacgatacccaatccactaccattggtcacggccgtcgacgtaaatgccatattagtctggtcacctagggtcgttttttctggcaatttgtctgtattctttaaaactgagtcagcttctccagttaaaattgattcctgaatttttaaattatcagcgtcgataattcgcaaatcagcaggaacattatcgccagcttctaggaaaacaacatctccaaccactaaattttcagcaggaatgtctgttctatgtccatcccgaataacagtcgcttcaatttgaagcatctgtttaattttgtcaattgcacttgaggcttttacctcttggaaatacccaattagggcattaataattaccaccattccaataacaatcgaatctgaatattctttcaaaacaaaggtggcaaccgcagctaaaatcaaaatatagataatactattattaaattgctttagaaaccggattaaattactttgctttttctcgatcaacgcgttgggcccgtactttttaagttgttcccctgcttctttttcggttaaaccgagttcagaattagtccccaaatcttgggcaaccttttcaaactcaatattataaaaattatcattgcgcgactgcgctccatagtcatcggatgtggattttactttcatcgatattctccttttaaaataaatttttgggttaactaaatcatatctaaaatgaataatacgcgtcaactaacttatctttttaataagaaataagtcttaaaaagaaccatttaatactttgcagtggcttgctgcaaaatttatttttcaaaaaaagccatgactttcaggccatgactttcaattttagttttaaattgtgcgttttctcatttttttctctaatgcccctaggactagatctgagataatcgccatcaacgcggttggtaaggccccggctaggataattgctccaccatttgtggcattagttccacgaataatgatatctcctaaacctccagctccaacgaacgttccgattgcggtaattccaattgccaagacaagtgcatttcgaattccggccagaatcaccgatagcgatagtggcagttcaatcatccaaagcacttgaaccttggtcattcccattcctttaccagcatctaagtaagcttcgtttacgttcaacattccggtataagtattcttaataatgggcaataatgcgtataagaataccgttacaattacagttgtaactcctaaaccaagacccaacattaaaatcgagagcattgctaaagatgggatggtttgaataacattagccagaccaacaatccagccactcaatttacgatgtttagaaataagaattccaattgggattcctacgatcgcagccaaaatcaccccataaattgaaattaaaaagtgacggctaaattcggaaagaacgtacatgccattatgagagaagtaataggctaattgttgccaaatattcatactttgcattagttattccctccttcaaaatagtggttcttttctaaaaattctttagcaaccactgatggttccttcagattattatcaacttgatagtttaattcttgcatggtctgcaatgaaatttttccatctaatttatgaagaacccgcttcaattccggatatttcttcaatgatttattattcacaaccacacttgcattatatggtgggaagtaatttttatcatctttcaacaattttaaattgtagctacggattcttccgtctgttgagtaacccagaaccgcatccattttatgactagcaagagcattataaactaacccaatttgcatgggataaatattaccaaagctataaccgtaacgttttttaaaatctgcgtatccgtcacccttacgacttagccaagtttggtcaattccgactttcatatctgccgaaattttcttaagatcattaacattttctagatgatgttttttggcataatcttgcgtcaccataaattggaaagtatccgcaaatccgtaggttgggaaataagtcatatcatagcgccgattaaattcttttttaacataggcattcacttgttctggagtgcgcccttggggtccattcaaaatagtctggtaatccgttccactaaaacgaacagccgttaggtcagcttccccacgtttttgagcttgaaaactaaccgttcccgatcccaagttattgataatctctgcattcaagttagtatcatgttcaatcaattgttgaataactgaagacattacctgttgttcagtagtattttgggcagcaattttaactgtatttccagtcgtaccaccaagtcctggccagccacaaccggaaagaactacagctaatgcgcccaacggcaaaattaatttaagaaatctttttaacatttagcccacctcccgtgttcgaggggttaatttgtcttccaattttccaagtaataaatcggcgactaaagctaaaataatcacagggattgatcccgctaagattaaatccggacgatatagatttaaaccgttgaaaatcaaatcacccaaaccgccagcaccgatataagatgccaaagcagtccatgcgattacataagtagctgataaacgaattccagacataattactggtaatgctagttgcaattcaactttccacaatcgttgaaaactattcattcccatccctttagcagcatccactaacgctggatctacactatctaatcccagatacgtgtttcttaaaataggaagtaatgagtatataaataacgccacgatggctggagttgacccaattccaaaaatcggaatcatcattgcaagcaaggctagcgcaggaatagtttgcatcacactggctaaaccaataacaaaaccagagatcttaggtgcccgaattaaaagcatccccaaaggtaccgccacaattatccccagcgctaaagcaaaagctgaaatataaatatgttgtcccgttttacttaagatgtcgcctccatattgattcaggaagttgatcattattgatcaccatctttctctttttgctcctccgattttgaactagcatcggtactgctatctgtagtgattccatcatctgtaaataaagcatcatacacaatatcaaccaaggttgctcgggtaacaattccaactagtttacgatcattatcaaccactggaacgttacgaagtccccgtttcaaaattcggtcaaccgtatcacgaataattgaattttcatttacatagaaaacatttggatccataatttcgcctacagttttaccagaatggtaatactcattaatcttttcaatgcttacaactcctttaagatgttgttctgcatcggttactaataaagtatcaacccgtcgactgtgcataatatcaagggcccgaactacaggttggtcaatcgcaattgaaactggcttattagccacttgcccaacggtcgtaatacttggtttagcttgaatcaaacgatcttgtccaatcaaattagccacgaaatcatttgctggttttcgtaaaatattttctggtgtatcaacttgaacctgcttaccaccagtcataaccactattcgacttgataaacgtagtgcttcgtccatatcatgcgttacgaaaataaatgtcttgcctagacgttcttgaagatctttcactaagtcttgtaaatcttcacgggtgataggatcaagggcaccaaaaggctcatccatcaaaatgatatcctggtcagctgctagtgcacgaacaaccccgattcgttgttgttgtccaccagaaagctgggaaggatagcgatctaagaagtcctctggtaaatctaccaatttaatcatttctttagcgcgttcgttacgcttttcttcagaccattttaatagtttaggtactaatgttatgttttcacgaattgtcatatgaggcatcaacccaatattctgaattacgtaaccaatctttcgccgaagtttaactgggtccattttggcaatatcttgcccattaatcttaatggttccagagctctgcttaagcatccgattgatcattcgcatcgtggttgttttaccagaaccggacgtaccaataaaacagatgaactctcccttttctacatccagattaaagtcgtcaacgaccactttatttccaggataaactttcgaaagatggctcatttcaagtaacatttgtatttaaacatctccttattaaatcttgcaatcctctttaaagtgtttaaagaattacaagttgttgaccgcaactataacatacctagaaaaaaaatgcacaaaatcaagcttttatccttgccattgtaaccgacttctttcctattattaaagcttattaaacttgtgaaaaccaatagatgttgtaagatagtagtataaattaaaaggagctgattaaatggcaaaatatgatacattacttccacgttttcttaaatatgtaaaggtaaacactcgttcaaatccaaattctgaaacagttccaacagatccaaaagaagttgaatttttaaaaactttagctaaagaattagaagaagttggcgttgttgatattcacacacaagaatctggttacgtcgttggtacacttcctgccaatgatggtggtaacacaccagttattggttacatttctcacgttgatacagctgactttaatgctgaaaatatccaaccacaagttcacgaaaattatgatggtaaatctgacattgaccttagtggtgatggcgaatgggtacttagtcctactgttttcccaagcttaaacaaatatgaaggtcatgatttagtgacaactaacggactcactctactaggggccgatgacaagtctggggtggccgacattatgactatgttggactactacaaggctcatcctgaagtaaaacatggtgaaatccggattggttttgctcctgatgaagaaactggtactggggccgaccattttgatgcaaaagattttaatactaaatatgcttatacagtagatggtggtccacttggcgaacttgaatatgaaacattcaatgctgctcaagctataattgaaattcaaggtaacgaagttcatacagccgttgctaagggattgatggttaatgcactccaagttggtattgattatcacaccatgcttcctgaacatgatcgtccagaagaaactgaaggacgtgaaggcttctatcatctatttaagatgacgggaactcctgaccatgcacaattggtttacattattcgtgatcatgatcgtaagatctttgaagaacgtaaacaaaagatgcaagaaattggtgacaagttaaataaacaactcggtcaagaacgggtaaaagttgaagttcacgaccaatactacaacatgcgtgaagttcttgaaaaagatatgacaccagttaaaattgcacaaaaggctatggaaaacctcgatatcaagccagatatctatcctgtacgtggtggtacagatggttcaaagatttcatttatgggcattccaactcctaacctctttgctggtggcgaaaacatgcacagtcgttacgaatacgtttctgttcaaactatggaacgtgccgttgatctcttgcttgaaattaaccgtctaaactcagaagaaaataactaattttttaaggactgtgacaacctagttgtgcagcccttttttaataaaaaggagcttacttacggcacttacaatggctataatcggatttggtaaaagcgctaatcgctatcacattccgtatattaaagaacgcgatattaaaattaaatatatctataatcaccgtcgtcatcgcgaaaaagaacaaggcttttatgacgctgacacgattttcactgataagcttgaccaagttctaaatgattctgaagttcaattaattaccatttgtaccccacccgcaactcattttgaatatggtaagttggttttggaacatggtaaaaacgttctgattgaaaagccttttgtagctaatcaaggcgaagctaaagaactctttgcattagcccagtctaaaaaattgctagcaatgccttaccaaaatcgtcgttttgatagtgactatttgactctcaaaaaagtcattgaacttgggtacgttggtaaacttttgtcactcgaatcacattttgacaaatatcgtcctgataaccgcctccatgaaggatctcaggttgatggccaattttatggtctaggggtccacatgctggaccaaattttaggactctttgggaaacctcaaactgttagctacgatattcgagctatccaaaattcagctagtacagtagacgatttttacgaaactcaattgttctatgataactttaaagcaacggtcgttagcaaccccctagcagcgcgtccctatccgcgtttcttattacatgggactaacggaacgtatgttaaatacgatattgatcaacaagaaaacgacttaaaattaggcattatgcctggagatcctaatttcggcattgatactccgagtcaatttggcgtggttaaatataaaaaccaaaatggggattggattgagaaacaaatccctactataaatggtgattatggtcgggtctacgactccatcgctaaaacgttaactaatcgggatgtgaaactcgtttctgatgagcaggccctttggaatatggaaattctagaagccggtatcgctgaaaaagggcctcatctttataatttgaaataaaaaaaaaccattaaacgataaatgtttcgtttaatggtttttactttacattatttccaacgtaaatttttcatcgcagcgcttttacccggctgctaccttaaattgttcattaacatatttagcatacatttggtgtgaatcaaccaattcttgatgggttcctgagccagtaatttggccattttctacaaaataaatttggtcactatccacaattgtggataaacgatgcgcaattactaatgttgttcggcctttcattaggtttgccaacgcgtcttgaactttcatttcggactctgaatctaaactagctgttgcttcatctagcattaaaattttaggattacgtaggaacgctctagcaattgcaattccctgtcgttgtcctcctgaaattttaacacctcgttctcccacctctgtatccaattgtttaggcatttcttccacaaatttcttagcaaaagctaattcaagtaccttccacaattggctatcttcaaaggtatcgtctaacccataagtcaaattatctcgaatggtacctgccatcatcgctgaatcttgtgacacaaacccaatttgttggcgataattagtcagctggatatcttgaatgttggtccgtatcaggttatgctgacaaatttgtccaaaaattcggattaaatttgcaatctaccacattagtattgctactcgtgaacctgtttcaagtggaattacaccagttgatattaagagtgttattaagcaaagaactcgctgggctcgaggagttattcagagttgcagaaacatgcatatctttactaatccgaagattaccctacttaaccgaattattttgattaatacatggctctattggtggtcattttctagacggttaatttatattgcagctccgttattgtatgcattattcaaggttcaagttgttaatgctaatttctggattttaatgattgtttgggccccaggatacttcttattgcattttgttttgggagatacttccagcaatattagaaacgaacgctggggggaaatccaagaaactttctttgctccatatttgtttattccagttattttggaatcaattgggatcaaagctaagaaatttaaggtgacagataaaaatgttaagttctcgattgtggataaactctacattattccatattttattatgtgggctttaaccttattggcgattgtgaagttcaattatggaaaatggggatcagaaatcattgtcggaagtgttatcactttctggttagtaatgcactttattaacctaagcttctgtttatttatttctatgaaacgtgatatcaatcgtaaaagtgagcggtttgttcggcatgctaaaggtaaaattatggtgaatggtgaatgggctaaatttaaaacccgtgatgtttcagatggtggtttttcatttgaatttgttaataaggacttacgtctaaaaatgaacgatcaagtcgaaggaattatttaccacgaaaactttccgattaagtttaaatgtactgttgctcgagcggtagatacggaaccgatttggtatggggtggtagtcaaaattgacaagaaagaagatcaagatcattatctccagttaatttatgatggagagaatcaattcttatcaaaagagcaagatcactggatgacgccttttgatgaacttcatttaaatgtcattctaagaatgaaagaattagaaagaaatgctactcaatttatgagacaacgataattagtttaagaaattgtaggtgtattttatgtcaatatcgggattaatcgtcttcatcatggcccaaattggatatactgggatggttcgcatggcaggtgtgaataaatacatgtcctggattacatcgatggtaattcaaacgttgctattgtatgttttggcgatgctaaattggttaaaatttggactaaaagcagtcgttattttaggctgcatttttgtagtagttcgaattggatcaattattttccgagtgggaaagctaccttttgaaggtatccattattttgatgtttggatgattgttatcggaattattatgggacgcatcttatttgccagcccattgattcactatgataattattcacattgggcattaatcataaaatacctcctatttcaaggtcatttgccagttgcggcagataccattatttcgtttacttcttatccaccggcgacggctttattcattacccagtttgtatcatgggtaggttttagtgatggtgctatgttactaggacagtttttattgatttgggccagtatctacgggatatttgcggttttacgggatcgaactcgttcaaccaactcatttataatctgttttgctgtttcaattattaatatttttaatatttcaattcgaatgaataatttattagttgattttgtccttccagtagtcgccgccgcaggatttgcgggagtttatgcttaccgtcgctcgccttggttgcagtgtgctacagcgtctttatttagtgcggaacttttactgattaagaattctggaacgatgtatgtagtgatgctaggctgttatttgttgtattctttagttaccaatggacaaggtcaacgctggaaacgcctgggtaaaggcatcagccaaaccgtcgtgacaatgggactaggctatttaccattcttctggtggaatcagcatgtgcatgcaactttcagcgctgtgtcaaaacatcaaattagtacagatgcgtacaagagtcagttagcccatgaaagttcagccgtaattgctaaaattggaagtaaatttttacatcagattttgagttttaactcgctatcgacgcgtggagtattacttattaacgtcggtctactcggagcttggattattattcgctggtttttacgtaaaaagaataacctgctaaaaagtttaatagctattgatatcagttttagcgcctattacatcagtgtatttgcgatgtatattgtttcaatgccctatgcagaagcaatcctgttagatggatctgaacgctatctttcaagtatggtgattctaaacctgctattagcgaccatggtgctggttgtagcgatggaccgagctagttttgaagaagatgttagtaaacgaggaatccgatctttcaggaatgttattaccaaaaatgtttatcagttgtcatcattggttttaatgttgtttgcctccattttgatgttttctgaaattaacggagttaagtataataacaccttaggtaaagaacaattgccggtacaattaaaacaaatagctcagcagagtacccagtacaatcatcagaaaattctattagttgacccacattttaatgatgtaaataattattacgcgggttatgtgggacgctattatttcttttccgatcaagttgttggacaggaaaacttcatgatgtctcaagcggagttcaaaaacaccattaaacagtatgattatgtggtgttacctgaatggcatcgaacatttacgaccatgctggaaaaaacgtaccatcaggattataaaacggggttatttaaagtcaccaaagatggtttacaaaaagtaaataaaattaatgtttaagagtaagctgaaaatgacaagtgaattgtgattttcagcttttttagtactttaagtataataataggaatagaagtagattaataatagaattaagcgtggtgaaaaaatgaaacgaagggataaaattcagcggattatcttatttgcgctgattacaagcggtttgagttggtgggtggtatctttcctacccgatgtttttacgttcaactggtggattgtaggagcggttaatgctctgtatgttttttatgtgtcagggggatgaaaacaaactatgggtgacaaaacctagagttgcgaagcatgataaatccacattgcaacaatcttggttcaaatttttggatttttccagactaacataaactaaaaaattcaggtagaggatacaaggttgatgtgtataaattattttatctatgaagacaattcagtataaggaaatagtgaaataattagccttaaaaccgaatcttagttgccactcttattaattaatatggtatagtagttatggtttttgaaaagagcgctccgttagaaaaataaaaactaacaattcattggtggattgatccatttttttgctttcttataaaaatggatcaattttatggtggagagtttatttcaagttaccgaatttctaaaccaatagaaaagagggactcaatatgtcagaaaaacttgatgaagtagatagtaagagcctggacgagattaatggtagtatcaaggtacctaagaatgcaggcttttggaagacgctgatggcgtactccggacccggatttttaattgcggttggttatatggatccaggtaactggattacgtcaattgcgggtggggcgcaatttagatatacgctcctttcagttattttactttctagtttaatcgcgatgcttttacaggcaatgtcagcgagactaggaattgtaactggaaaagatttagcgcagttaacgcgggaacgaacgagtaaaagagttggattcttgctgtggattgtcgctgaattagcgattatggctacagatattgccgaaattattggatctggaattgcattggagctgttattccatattccattaattattggtattttgattacagcggcagatgttttgatattgctgctattaatgaagctcggttttagaaaaatcgaagcaattgttgcaaccttagttgctgttattttaattgtttttgcgtacgaagtactgctttctgatccaagtatttcagggattatcaaagggtatgtaccttcagttgagattttaggtaataactcaatgttgtatctgtcactaggaattgtcggtgcgacagttatgccccatgatttgtatctgggttcttcaatttcacaaactcgtgaagtggaccgaaaagatcgggaaaatgtcgctcaagcaattcgtttttcaacgattgactctaatatgcaactattcttagctttcattgttaatagtttactattgattttgggagcggccttattctatggaacggatagttcactaggacgtttcgttgatttgtttaatgctttaagtaataaccaaattgttggggccattgctagcccagtacttagtatgctatttgctgtagccttacttgcttctggacaaagctcaacaattaccggaacattatctggtcagattatcatggaaggattcattcgactacgtgtcccattgtgggtacaacgtttggtgactcgagttctttctgtggcaccagttttgatttttgccatttattaccacggtgatgaagctaaaattgaaaacttactaacgttctcgcaagtattcttaagtgtggctttaccgtttgcggtaattcctctggttatatatacaagcagtaaaaagttgatgggtgaatttgctaatcgagcatgggtaaaatggtgtgcttggactgcaacaattgtcttgattttgttaaatatatatttaatccttcaaacgctaggtttaatcaaataagtcttgatatataagcgtttaattaacttaaattgaacttcaaaatttgtttcaaagatactcatttctaaacgaaatgggtatttttttatcttatggtgtaaactaaaaatataaaaaataactgtctaggtattggtgtgaaaaaatggaaacaaaaaagataacgattaaagatgttgctagacaatcaggagtttcaatctcgacggtttcgcaaatcttaaatggaaatgaagctcggtttagtgcacttacggtaaaaaaggtaattcaggcaaaaaaagatttaaattatgagcccgattactttgctcgtcgaatgattatgaaaaaaagtaaaacgattggtgttttagtacccgatattaccaatccattttttagtgaattagttcgtggaattgaaaatattttttatcaaaagggatttataactatgctttgtaacgcagatcttgaccaggaaaaagaagatgcttacttagctgaattgagtcggcgtggggttgatgggtttattattgctagttcagtaatttcaaatgaatctattaatgccaccttaaaagctaaaaatcatccatttattgttcttgatcagaaaaaggctgatggaattagtgacgccgttttaactgatgatttttcgggtggggctcaagccgctcaacatttgaaagatttagggcatcaaaaaattgccatagtcatgccaactaatgcacctgaaaatgtttgtggtcgtttagctggagtacgttctgtatatgaagaaaaacaaattgaaattatcgatgcccagctatcaaaaattggtggtcgggaagccgttgctaaaattttagcaacggatgttaccggaatatttgcggtcaatgacgaaattgccttaggaatttatttgggattagccgaagctggcaagcagattcctgaagattatagtgtgattggctacgataatattgatatgtgtgaatatatggttcctaaactgaccactattgcacaacctatttttgagttaggtcagacaacagctaacatgctgcttgaaagaattgaaactcctgataagaactgggaagagaagactttacccgttcacttagtgaaaagattttccacagcacatttgatttaatagaatcaatgtgctatatttttgatatgctattaaaacgttttcataaaacgttttaaacaagtaaaaagataatcgaaaacggaggaatccatcatgaacactgtaacaattattgggagcattaacttagaccgtactatccgagtaaaacaaatgccaaaaccaggtgaaaccatgcatacgaaagaaattttttcagctggtggcggaaagggagctaaccaagctgtagctgctaagcgttctgaagctaagacaaactttattggtgcagttggtaatgacgacgctggccgtgcaatgttagaattattggaacatgaaaatattgatatgagtggaattgaaactttagataaccaatctacaggacaagcatacatagtagtagatgacgctggtgaaaatcaaatcatgattcatgcgggtgctaatactgcatttactccagaatatgtccagtctaaagctgatttaatcaaaaatagtgatttcattattgctcaatttgaaagttctttagattcagttacggaagcctttaagattgctcgtgaagcaggcgttaaaacaatcttgaatcctgctccagcggttgaaaaagttcctagtgatttattagcagtaacggatatgatcattcctaatgaaactgaaactgaaattttaaccggaatcgaagtaacagatgaagcaagtatgaagaaagcttctaaagtattacatgatgaaggaattgaagcagttttgattaccattggtagcaaaggaaccttctacgatgttaatggtaaaagtggaattatccccgcatttaaggtaaaggctgttgatacaacttctgctggagatacattcattggagcaatgagcaccgttttgaataaagactttagtaacttagaagatgccatcctatatggtaataaagcttcatccctaactgtacaacgctttggtgcacaaccatcaatcccttacaaaaaagaattggaaaaataggaggaaataacaatgaagaaaactaaaatgattaactcagatatgtcacgggtaattgctcaaatgggtcactttgataaattaagtatcggtgatgctggaatgcctgttccaatgggcacagaaaagattgatttggcagtagataatggaattcctagtttcatgcaagttttaactaacgttttagaagaacttgaagttcaaagaatttatctagcagaagaaattaagaccgaaaatcctaagatgctagaaaatattaaagctttaatgcctgaaacaccaattacttttatgccacattcagatatgaaacaagatttgaataattgccacgcatttgttcgtactggtgaaatgactccttattctaatattattttagaaagtggcgttgtattttaaatttagcaatttcgtcaattaattaaggaggaattacatgaacacgacagcgttattaatcggacttggaccactattaggttggggattatttccaacaattgcatctaaattcggtggacgtccggtaaatcagattgtaggtacagcttttggaacatttatctttgcttttgtttttgctctaatcaaaggattagccttaccaactggaatggacttggtttttaccgttatttcagggattggttgggccagcgctcaaattattacatttaagtgctttgcaatgattggatcttcacgggccatgcctattactaccgctttccaactgttaggtgcttcattttggggtgtgattgctctaggaaattggcctggagttacggctaaaattattggtgcagttgcgctagtcttgattattattggtgcttcactcacggtctggtcagaacataagtctaaagaaaatacccaattgattactaaagcagtcgcttggttggctgtaggtgaaattggttattgggcatattctgccgctcctcaagctacatcagtcgatggaatgcatgcattcttacctcaagcaattggtatggtaatcgttggtgtagtatatgcaatcttcctctcaatgcgaggtgaaaaatcagcattaactgaagcagtatcttaccgccaaatctggtctggtttcttctttgcttttgctgcactcacatatttaatttcagctcaaccaaacatgaacggcttggccactggatttattctttcacaaacttcagtggttctagctaccttaactggaatttggttcttaggtcaaaagaagacgccaaaagaaatggcagtaaccattggtggattagtattaatcttagttgctgcaacaattacagtaatgatttaataaaaaataatttgttttaaaaagtttgcaacacgttctgatattaggaacgtgttttttgtattcactcgaattagtccaaaaagaaacagcatttcacagttgaaatgctgtttctttttatgcgtgctgttcgtttttctgaataaataatttccaaaaaagataagccaaactccatattaatatgaacccaattaccagaccatagcccagccaatttaaatcaatcgattgaatccatgtgatgaaactagaattaacgtgggtaaagtcagcaaagacgttgcctaactcgactaaaccaattaagaaagctgcaatgactgaaacaaaagtaacggttaaattgtagtaagccttacgtttaggagtatcaaatgcccatgtgtaggcacctgacatcatcacggaatcggttgtatccatcacgttcattccagcggcaaataaaactgggagggcgatgattccggctaccgatacgtttgattgagcagccgttgccgacagtgcaatcaaggcaatttcagtggcggtgtcaaagcctaaaccaaataggaatccaattggatacatctgccaagcatgaacgattttcttgaataaaggagaaactaagttagcaataaaacctctagatagcagtaaatcgtttaattcttgttcatcaagaccggattttactaatctcagtgatttataaagtttgattaagaccattaaattaaaaaaggcgattaaaataagaaaactaccggatacaatcgtaccgatttttccaccaatggcttctagaatgggtagcttaacttgggcccatttagcagaaatactaacgactaaagccattagaaatacaacagtagagtggcctaatgagaagaaaaatccgactccataaggttgcttcttttggtgaattaataaacgaacggtattatctatcgcggctatatgatcggcatcaaaggcatgacgtagccccagggtgtaagctagcacacctaaccccagaaaactaggatgtttttgggcagcaactaacagtaagataatgcccaaaatatggatagccaagctagctgtgtaatacggaagtgctccataaaataatttcttcttcataacgatatttctcctaacttttaaatcgtaaattcacgtaaatagttttcatcataaataaaaattttctgattcttgatatcaattacgtgttgttcttttaaatcatgaataattcgattaacgctgtttctagttgaaatcccacagaaattggcaatttcttcgttagtaatgggaaaatcaatcaagataccagtcgctccacgcctaccaaaaatatcaattaacttatagataaaggcgcagacggcacctttcttaccgttcatagtcatccattgtaacgattttatattttgggttaatttaattcgatagtagtcacgcacgtaatcttgtaaatgagtatcgtgattaacataatcccaaaatgttttacgcgggatgcgataaaaaatagcttcgtcagattcaatacgcacgttcaaaggcgaagccgtataggcagaaatttcatctctcaaaagcgaaacaatatcagtcgaatttatgtaagaaagattaaattcacgaccattctttaaaatgatgctggttttgacaattccctttttcaagacatatgtataaccttcttctaaaccatgataggtcagataggaatgttttgttttggtaattgtagaaacctgtttattctctaaaaagtcaattaaatagctagtgttcattttttaactctccatatgtctaaaagtaaataatatgtacagacatctattatcataagaaaaaattgtgagaagtgtaacaaatgttatacccaaatgtgatacccggtcgattttacatagcctaatatattgtctagcgccaaaaataagggagtgtgtattaagttatggtacaaattgacctaccgtacgataaaagaaatattactgctaatattccagacaaaaattttgctggattattagaatctaaagctgaaagtttccagaatccgttaagtgaaaaggaaactgttgaaaaatcaatggacaatcccattggaagtcccagcttagaagaacttgcaaagggaaagaagaacattgttcttattagttctgatcatactcgaccagtaccttcgcatataattacacctattattttacgtcgaatccgttcggtagctccagatgcaagaattcgtattctcgtggcaaccggttttcatcgtccatctactaaagaagaacttattaataaatatggttcagaaattgtagagaacgaagaaatcgtaatgcatttttcaacagacgatgattcaatggtaaaaattgggcaactaccttctggtggggattgcattatcaataaagtcgctgctgaagccgatttgttactagcagaaggatttattgaatctcacttttttgctggtttctctggtggtagaaaagctgttttacctggtattgcatcatataaaacaattatggctaaccactctggcgaatttattaactctaataaagcccgtacgggtaatttaatgcataacccaattcataaggatatggtttatgcagctcgcaccgcaaaattggctttcattgtcaacgttgttttagatggtgataagaaaatcatcggttcatttgcaggtgatgttgaagcagctcataaagttggttgtgattttgttaaagaattagctagtgttaagaaggttcctagcgatattgctatttcaaccaatggtggttttccccttgatcaaaatatctatcaagccgtaaagggaatgaccgctgctgaagcaactaataaagaaggcggcgtaatcattatggttgccggctctagtgatggacatggtggagaaggtttctatcataatttagctgatgtagacgatccaaaagaatttttagatcaagcaattaacacaccaagattagaaactgttcctgatcaatggacttcacaaattttagcacgtattttggttcatcatcatgttatttatgtttctgatttggtagatcctgaattaatccgcagtatgcacatggatttagcaacaacatttgatgaagcattgcaaaaagcctttgaaattgaaggcagtgaagctaaagtaaccgttattcgtgatggattatcggtaatcgttgaataatagactaagaggctaaacaaagatgaatgtaactaaaatactacaatccgttaaaaacgaagaactatcaatatcagaagcagctaagcaattatctgggttttctgaactcggttttgccaaagtggatacacaacgtaaagcccgaaacggctatccagaagtaatctacggggaaggcaaaacggttgagcaaattgtagcgataaccgaagatcttttaaccgaaggcaaggcaattctatcgacgcgagtttctgctgaaaaagcggtagttttagagcagaaatttcctgacggaatctatcataaagacgcgcggtgttttgttttaaatccatctagcaaattaacagatggatatattgctattgtaactgcgggtacttctgatattggagtggccgaagaggcagctatcacagctgaaacttttggcaattctgtcaagcgaatctatgacgttggtgtcgctggaattcatcggttatttgctaacttagacgacatcaaaaatgcttcagtagttattgtgattgctggaatggaaggtgctttagtcagcgtagtcggtggcttagtggacaagccggtaattgcggttcccaccagtgtaggttatggaactaacttagacggaattacggcgttatttagcatgttgaatagttgttcatctggggtaagtgttgtcaacattgataatggttttggggcagcttataacgctagcattatcaataaaatcagagaaggagaataatttttatgcgagctttatatttagaaccattctctggtctaagtggagatatgcttaatggacttcttttggatcttgggggtaaattagatttattaaaggaagaattaagtaaatttacgcttgaagactatacaattcaagttgaaagaactaataaaagtagtatttttggaatggattttgatgttcaaattgctcaccagcataaagatactggaataaaaggcgattttgaccaccacgaccaccatgaacattcacaccacggtcatcatcaccatcatcatgaaagtcgtggattgactgaaattctgggcttgattgaaagtagtgatctttctgacgtagtcaaaaagcacagcagcaatgttttcaaagatattgctaaagcggaagcggctgtacataatgcggatgttaataaaatccattttcatgaaattggagctgtggactcgattgtagatatcattagtttcttcattctttgggagcaatcgaaaatagataaggtttattcgacaccgattactgaagggagtggcacgattcacgttgcacatggagaaatgccagttccagttccagcagtaatgcaattacgcaaaaattatccattaaaaatcgttcaagattttgatattaaaacggaattggtaactcctacgggattagctttgtttaaagaaatcgctccagaatttacggccccagaaaacatgtactttagtcaggtgggttatggttttggaaagcgagaaacaggaaaatttaatgccttacggggttcattgctaactgtggaacacagtaatcaggaagtaaaaactaatcatgacgacatcatcaaaattgaagctaatttagacgatcaaactccagagcaaattggatatgctatggatattttgttagaacatggagctctagacgttttttgttcatcaatccagatgaagaaaaatcggccagctattttgctaaatgttttggtgaaacctgaagcctttgacgaaatcagttatttaattttcaagcataccaatacagcaggttttcgttatcagggcatgcaacgtcggattatgaaaagagaatttaaagaagttcaattcgaaaatgaaaatttacgaattaaaaaatatcaatatcaagatattgaaaaatttaaaccagaatttgatgactgcgaaaaaatagcaactaaaaatgattggtcattacaagcaacatataaaaaaatacagaatttatattaagtagataacaaaggagtttaatttaatggtaaatcatctattagccgaatttatgggaacagcccttatgataatttttggtgtgggagttcattgtgacgaagttttaaagaagactaaatatgccggttcaggtcacttatttgcaattacaacttgggcatttggtatttcagttgtgttatttatttttggtggcgtatgtattaaccctgctatggcacttactcaagcaattttaggtatgattccttggaattactttattccttatacaatcgccgaagtattgggtggtgtagttggagcagtgatcgtttacattatgtatgctgatcactttaaagaatcagaaggttcaattgatccaatcgcaattagaaatattttctcaactaatcctaacttacgtaatttaccacgtaactattttgttgaaacattcgctacattcgttttcctaacatcaattctagcaatcgttcatggttacgattcaatgtcaccaatagccgtgggactcttagtatgggccattggtatgggacttggaggtacaacaggattcgcgatgaaccaagctcgtgacttgggaccgcgcttagcattccaattacttcctattaaaaataaagctaataatgattggcaatatggtctaattgttccaggaactgcaccatttgttggttcaattttggcagcagcttttgttagattttacttacacatttactaaaaaaatcgataattaaaggagaaacattattatgactgacttagaagcaaaagaaaataatttaattaaggatttagcatcaaagcaaagagttgcaatcgcttattcaggcggaattgatagtacatacttacttaaagtggctgtagacgaattaggaaaagacaatgtgttagctatggtagttaactcagaattgttcttggatgatgaatacaagaaggctttggaattggctaaggaccttggtgcaaacgcaatgggagttagcatgagtgaattagctgatgaaagaattgcagctaacacaccagaaagctggtattacagtaagcaattgttatacagaactattaaaaaggcagcagcagaaaaaggctttgatatcgtgcttgacggaatgatcatggatgataacgctgatttccgtcctggtatgaaggctcgtacagaagaaggcatcgtaagttcactacaagatgctgacttatacaagagtgaaattcgtgaacttgctaaagatcgtggaatttccaactggaacaaggtagcttcatgtagtgttgcttcacgtttcccatatggtacaaagcttactgcagaagccgtaaacaacgtatttgctggagaaaaatggctacgtaacgctgggtttccagttgttcgtgttcgtgtgcacaatgatttagtacgagttgaagttccagaagtagaatttgccaaattattagctaagaaggctgaaatgtcagaattcatgaaaggattgggcttcaactacgttactcttgatgtagatggtttcaagtctggtcgcatgaatgatgttttaaaagaagaaaaaaaggccactttaatctaatttgataaaggaaaaatacgatgtttaaatatttaatcacccagcttcaaaatgctagtaaagttatttacgatggaagtcaatgtcgagtatttttaatgcaagcttatcaagaaagcattgcaatccgacctaatctaaaatctgaacaagaactagcattaattaatcgtttttatgaattaaatagagaactgattgagctttcagataatcgctttaacaccaagcaattagaatatagaaaagtgatcgatgaattgatcagtgccatgcaagctgcataagatgaccgaaaaagacgcttctaaattaaaattagaagcgtctttttgattttatggattatttatttttaaaacgtaactcatagctaagtaacattacgactgtaattgctaggatatacaagggtaagattccaatccatccggtatgaaatgcactaattagataggtgaagaaactgatacaaatatagtacccaaaactaaagataccactagctaccccaatcacgtcttcgtaaccaacgagtgctaaattaagcgccattggaagtgtaatatacaaaccaaaaaagacgataaaaatacataaaataaagaggtaaatatttccaatccaactggcacccactaataggaaggctccaaacatggctaggattaatccccatttggtaatttgaatggcgctaatcttggcgactaggtgattaatggttatagaaccgaaaatactagataaggcaatcactactcctaaaacaccatattggatagaactaagatgaaaatgttccatgaagataaaaggtgcttcagcatagaaactgaagagaatgccattaattccactaattagtaagccgtaaacccaaacgtttggatcagttaaaagacgcataacaataggcttgaacgccggttgacgagtaacattagacaattggatattagtttctggtagtcgtcggagtgtatatagatataaactaactgccataacaattaagacagaaaatacattacgataaccaaaataagtctgagtaactccgcctaataatggtcccattgcaggggagagggctaaggcagccccaactttagcgaatactttcgccccggttgtaccagcaaaggattcgcgcatgatggattgcgttacgacagaaccgacgctggcaccaaaggattggaccaatcgaaatagaattaggattgcaaaattaggagcacacagtaatccaatgttaccggctaggtaaacgattagtcctgctaacatcgctggacgccgaccgacacggtcagagtaactaccccagaataaaacacctagggcaaaagcgatgaaataagaactcatggttaattgccccgtctgagcagtaacctgcagagccgaacttaaagctggtaaggcaggggtaaagatggactcactaatttgtggaaaaccaaccagaaggataattaatagtaaagatggaacttgttttcggacgtttttcattttaaatctccttaaattttattatgcagaaaaacgccctaatttaattacggtagcagatgcgataaaaccaacgtaggccaaatagactcctccttttcaaaatttgatttaattattgtaacaagttaaatttatttttccaaatttagttcaaaggctaaacgtcgaccatcttcggtagggttaacatagataataccggtgtattcaaaattaaattgttgaacaaggtgttgcattcgctgatttagttcgtgcgtatcaatccggaaattattaatctcggcgtgcgttcctaaggtgattaaattggataggaagaacttgctgagagacattccgcggtagtcaggtgaaatagcaattcggtgaatagtagcatatggcgcactagtatttttccattgaccgtctgaaatattttcgtagttggcatccggggtggtcagtaaagtggcggtacctgcaatttgattatcgactttcagtacccaacaatttccatgattaatgtcatcggcgaaagtagtttcgtcgggacttccatcttgccattgagggctcccatccgctttcaataaagctttggcgttatcaataattttcataatggcaggtaaatcttgaggttgagctttttaacgtatatattactcatgtagctaggctccttttattgtatgctgtatattaagtatagtataaaaaattggaggattgggaaatggaaattagaactctgcgttatttttggacaattgcagaagaaggaacggtttctaaggcagcggaagctttgcacattacccaacctactttgagtcgacaaatcaaagagttagaagaagaattgggaacggagttatttattcgagggcggcgccaggttcaactaacagaagcaggcatgtttctaaaatcccgtgcagaagaaattttagagctaacccagcaaaccagtttagaattcgaaaatcgtaaaaagcaactctttagtggacatatcaccatcggatgcattgaagccgataattctgatactttagccttaatcttagaggattttatccgagattatccgcaagttacgtttaccatttacagtgggactagtgacgacatcacagagcgtttagataagggcttagtggatgttgcagttttaattaagcccatcgccacagaaaaatatcacgaaattgtacttccccgtactgaaaaatggggattattagtgtccaaagcatcgtatattgctcagaaagataaaattgtaccgactgatttaatggggatgccgttgttagtgtcaggacgtcctgaagttcaggaattaatttcaaaatggagcaagattgactatcaacaattaaatgttgtcggtcattataatttaacctttaatgtgctcccactagtgaaacgtcaagtagctcaagcgttcattattgaaggatcaactaggaatacccatccggatggagttaaattcattccgttaaagccggaagttaatactaactgcgttttagtttggaagcgggagcgtaatctatcaccggtagtaaataaatttattaattacttctaccatgctttcaaagcatagaaatggataaaataagcattttacgaattacataaaaagtcttaacattatttttgtcgaaagatgttaaggctttttctaatcggaggtgcatagtggaaatagcttattttacccatgctgaagatggaaatactgaaattctgatgcgaaaaattgctgggcaattaaatttgccatcaaatcggattatgccaaaaaaaccatatccgataagttacgaagcattggtggaacgtgctaaagatgaacatgaacacagtattttccctgaagctagcataaaccatgaaattagtgatgatgttttaatactggggacaccaatctggtttggtgagttacccaatgtggttaaaagatttttaaaggaacagctggttgcaccacgagtaatttatcctttttgcaccagtgaaggtagtggattgggaaacagtatcaacgaattaaaagcaattttcccagacacagagattaagctagggttagcagtacagggttccaaagtaaataaggcagatcaagcagtagcaaattggttagaacagttaaatttaatttaaaaggagtagtttaattatgaaaaatgaagcagtaaaaaacggggttattttccccgctggacctaaaaatgatgcatacgcaaaatattttgtaggacaaagttacctacaggggcttgtttcagaccccaaagttaatgttggagttggaaatgttacttttgaacctggttgccgtaacaactggcatattcatcatgatggattccaaattttactagtaacgggtggagaaggctggtaccaagaagaaggacaaccagcacgccatcttacagctggtgatgttgtagtaacccatgatggtgtaaagcactggcatggcgcaactaaagatagttggtttgcacatgtagcgatcactgctggaacaccagaatggcttgaagcagttagcgatgaacaatataaggcagttgaggaaggcaaataatggcaaaaaaacagaccgcaggacgcgaacaattaggtgaatttgcaccaaaatttgcagaattgaatgacgatgtattattcggtgaattttggtcacgtgaagaccagctttcagctcgtgatcggagtatgattacatgcgcaagtctgatgtcgcaaggcttatttccccaattagaagcacacatgaagattgctaaagaaaacggcgtaactaaggatgaaatggtagaactaattacacatctttcgttttatgcaggttggcctaaggcatggtcggcgtttggattagcaaagaaaatattcgaataaaatagtaagacagctgtctcaatctgaggtaactgtctttttatttactaatggtctttgcgtaattaaaattccataaatagttaaaactacacaaccaacagttaatggtcgctccgattaaaactaaaaataagaaggtaatcatctgtataactagggtaattaataggcggttatgttgaattttattgtcaaaaagtttccataatatgtaaatattgaaggaatcactaactagtaatcccagaatgaaaagatcagcctaactagcaagcattaatttgtaatttagcccggtatgaattaagttcaacttagattacgaataacctaatgagaacatattaaaagaatcgtcagccaccatcgctaacgattctttttagtaggtaatattatttttcgaggaattcaataaataatttttgatagatttcaatgaagtctaaatacatctgtttaggtaaactttcgttaacttgatgttgggaaccatctcctggcccatatacagcaaaaggaaaatcatgcggcttatccttagctagattagaagcatcggtaatcccggggctagcagccacgacaatatcgcgtcctgcatattctttacccagtgactgaataattttaactaactggttggaaggactcgtagcaattggaaattcattcataattatgtctgtattaatttgagctccatttgcattgtaagatttaacgaatgtttcaatctgcttagccacctggttattatcgtattctggaatcgtccgaacgttaaccaaagcggtagctaaatcaggtaaggaattaatctgactaccaccattcaaaacgtcaatgttgaaacgtactggacccatttctccggatggaatcgtctcaaagtaggtgttagcttcattcaataattgcatcaatggtactagagcgttgtagcctttttcaggagtagagctatgaacggaagtacctttagaagtaaatttaatatcgaaagaacctttttgttcagaagcagtaccgtagacggtagaaggctccgcaattagcaagcccgctgcgtcttccatataataatcgcgataaaaggcggcggaaccttcttcaccaacctcttctccagcagttgctagcaaacgaattgtaccttttttgggtaagccttgttttttcaattcgatcatggcaattactaaagctgctaaaccagccttcatatctgtaattccgcgaccaaagagcttgtcatctttttcggtcatggtaaatggatcattatcccacgcggccaaatttccgggatcaacgacatccatgtgtccggaaacacctaagacaggagcgccttccccaatttcggcaactagattagcccgctgatcctcaagagggagaatttttgcctcaatgccattttcttggaataaatcctgcaaatattctgcaacttctaattcgtgatcgttaacagatttgattttaattaaatcagctaaaatttttagatatgtttgcgaatttgaaaccatagtatccattccttccttcatcctttttcaataaaatagcttacgctttttttactaaaactgccactaaaaacataagttacacatttctaaagattcagccgaaattagggtaatggtcgcaaataccttgataaaaccctatgaaagcggtatctttaaatgactaaactcgaggagatgtgtttatgtatcaagcaaataaacaacgttatgaccaaatgctttataaccgaattggaaatagtggattaaaactatccgcaattggattaggactttggaacaactttggaagtgtggatccgttagaaaaccaaaaagaaatcatccaccaagctttcgacttgggaattacgtattttgacttggctaataactatggtcccgaacccggtagtgcggaagaaaacttcggtcggattatgaagtctgacatgcacgcttatcgagacgagatgattattgctagcaaagcaggttacgtgatgtggcccggaccttatggtaactggggatcacgaaagagcattattgctagtgccgatcagagtttgaaacggacgggcttggactactttgatatcttctacagccatcgtccagatccagaaactaacattgaagaaactgctttggctttggatcaattagtgcgagcaggcaagaccttatatgtcggactctctaactacaacggtgaacaaaccgcagcaatggcagccatctttaaagaattgcatataccatttgtgattcaccaaccacgttacaatatgttcaatcgacaagcggaaaccgaccttttcccagtgctagaaaaggaacaaaaagccgctgttggtttcagttccttgtcacagggattgctaacggataagtatctcggcggaattgctgatgattcacgggccaagaaagctacaattccatttttgagcccagttcaagttaaagaaaccttagcgaccgttgaaaaattaaaccaagtcgctcaacaaagaggacaaagcttagctcaaatggcgttagcttggaatcttcgtgaaccagccttggcctgtgcccttatcggagctagccgccctcaacaagtgattgataacgtgcgggcccttgatcatcttgatttctcagatgaagagttagcccaaattgaacaaattcttggagaacaaacgtcaattgactggagcgcccgttaatccacccgtcgttcaaattctttcattcggaaactaattatggaggctgaaatgaacatcgataaaactacaatttcaaataagtttaaagaagtttttcatacagatgtggacgaagtctatttttcacccggacgcattaatttaattggggaacacaccgattacaatggaggtcatgtctttccatgcgccatcagtttagggacctacggcggatatcgacgccgaacggatggaatagtaagaatgtattctggtaattttccagaggtaggaatgttggagtttgacgtaaaccacctcgattttgacccgcaataccaatggagcaattatcttcgaggaatgatgcgcgaaattcgggatttagcccatgtggactacgatcatgggtttgaactctacctagaaggcgatttgccagatggcgctggattatcgtcatcggcttcgattgaaatgttgatgggtaccattcttagtagcgaatttaattttaaagtcgaccccgtagtcatggcgaaggcgggacaaagggtggagaacaattatattggggtaaattcaggcatcatggaccaatttgcggtcaaaatggggaaacgcaacgaagcaatcttcctagatgccaataccatggagtatgagtactcaccgctggacttaggaaagcatatcgtattaatcatgaataccaataagccgcatacgttagctaattcggagtacaatacgcgacgcgcggaatgtgaacaagctttagattgtctgaagcgaaaactcaacatcagcacactaggagacctctccaacccagcctttgatcaatacacctatctgattcgagacgaaactttaatcaaacgggctcggcatgcggtctttgaaaatcaacgtacgatggatgccaaaaaagcattagataacggcgatttgaaactatttggtcgtttaatcaatgcttctcatatctcacttcaatatgactatgaagtgagtgttccagaactagacctgttagtcagtgaagcttgggaacatgatggggtactcggcgcgcggatgattggtggcggatttggtggctgtgcgattgctttggttgaacaggatcaagtagccgatttaatcgaaaaagtgggtgctaagtaccaagctcaatttggttatgccgctgatttctacgaagccaaagtggtcgacggaccacataaaatttaagtaaaaaaccacgaaatgagaaccgcaataactcatttcgtggtttttttactttctatcatcaaactgctatgttctaactgaaatataataaaaaagacgaattacacctttttcgggatgaactacacgttttggaccaaaaactacatcttaaaaaccgtttttgacttctgtagtattaataattgaccaagggcccttggatctacaccttaggagattcaagaaatggaaaataatgaaagaacaattaagctaggattagaatatttattagaagatggccacgaaaaaatcgtgtacggcgcattaaaaaaattacacattaacactcgctcagtcgaatttgacgattttttgcaggaggctcgtttggcatacgctaaagcatacgtacgcttcccacaggacttgcaggaaaatgatcgacaattccacggctacgcctatcaggcggtttactggcgggtgctggacatcattcgttaccgacaaaaggaaaaagacgtgcaagctgtagaactggaagacgatgagaaacaagaagcccgatgggggcacaaaccatcgtgggtagaacgcataatgtctgatcaacttttccaagaggtttacaaactttgcatgccagctgaaaaacggttcttgaaagcttgttatgtggaacaactttcgggagcagaaattgcgcgtaaagaaaaagtgagtcgtcagagcatttataagtggcgaaaagcggtcggaaaaaaggccttatatgttatcggtaaaggtgaagatatggactataccaaagcactgaaaaaataggataggctggtaaaaatcacgggggtaaattttacccgtggttttttggttaggtaaaataaatgaccgataaattcctacggcaaacgcttgcaaaatattgtgaaaaataatactataataccagaagtaagaacgtgttttatagcaacactaagtacgtccggggaagcgggcttacttcgtttaggtttggttgcatataaatttaatataaacgggggaatatttttaatgggtaaggaaaatattgtgggtgatttacacgctgtaaatcagaaatctagtaatttaaaaatgttcaaggttggaaaacagtgggttttagcatcgaaagttattacgctgtttgggacagcgtgcaactccgatagcttcgaaatggatgataccgaactacaacgatcgcaaaagatagatggggtaaccagaatggcttcgtaccattattaataaaaaagcatactggctccttttttgtgggttgctcaggtaaatttctttcaaaaaaagtattgaaagtattaggcatttgtaggctagtatgataaaatatagagaacgagtgaaagcggtctcaactataaccaataaatttaaactttaaaaataaaggaacagttttaggtggaccaataacagcagttgttattgcaccgacacggtttccgaaaaatgaaaggatgattcttaaaatttaatattacaagtctctcatggaggtagggccaagatgtcgtgaggcattaagcaccgccactgatctgagcttcttgggaaaatctccttgaagtggtggtggataaacgttctttgagaacaaggggaggggcttgtaagactaaataaccactagtgtaaggctactgtacgattattgtaggaattaatcggttaatgacggaattgtgcgcaaaaaacgattttcgcaatgtgcaattaggggatgtaattgagttgtgaaatgacgcattttatgggtgagcagtaacaggggaagtccgacttcgatgaaggcggcacgcaatatcgcaacaaagggttttgaatcaagctccgtaaaaagtggtaagaaaaaaatacttgagcaagtacatctgtcggggaagcgacagatctgggatgataatgattcacttgggaagaagtgaagaatggtaagaattaaggctactgggggcagtagttatgggtcggaatctaatggatgattttcatagattttaggtaggctaacaattccaaaattaaagcgcagtttaagttaaacactagtaaataagaatcttccttacaagtaaagtaatagtctagaaattttgataataaaatttctgggctattttcttttgtatcgaatgaacatactaattatcgaaaatgaaaaatctccactgttagataaaaatctgacggtggagattttttggataataaggaagtaattaggaagggagaagatgaacgctataccaaacgatttagttgacgatatttacggggtgataccgcatattctttaaaaaattctcttgaaaaatttgcggtgttgtaaaatttaagaatctgagctattctaccaatcgacattgaggtgtttaataacagattctttgcttcggtcattttaacgtgacggatatactgggtcacggaaaagcctaactctgcgcgaaatcgagtcagagtgtattttttgtccaggtttaaggttgcgaaaatctgatcgattcgtaagcgttcataacgatgcatattgatatagtaagcggtcagggcgacctgtttagacactttagaaaaatcgacgttgcgggtgggttcgtcgttatatgaaaaaaatgtctgaacaatatcaaacaaaatatcgcgaaaatcttcaatttttaggttttgggagcttaaaaatttgatgaaggcgagccggagttctaagaaatgtgcgatattgaggtgggtaaaaaaactgatattggtcaggccgcctaccaaaccaattagagactgtagcaccacctcggaagataaatcttgaagtgcgcagtctctaaaaaaatgatcgatatgttcgtgggcatgttcataatctttattttcaaagaagtggagaagatcatgttcaagcaatgaaaattttaaaataaatgatcgatcttgagatgttaataaagaaggatccaatttaacaattctcataattcctccttcctaaagataatttcttccttacaaaaatgcattttgtcgaattttcaaacttaattcaagcaatatgtttgcaaagtttaagattgtctataaaaagtacaaaaacacccagaatactacaaataagggtttttaaggaggcgtattgtttgccaagacatcaggataaccaatataatacacttattaaaagaaagtaaccccttcaagattattgaaaataatcttgaagttccaatgttagatttttctaattttatggctgtttttctaatctcaggatatcaaaattgtccaaactggccaaactgattaagcgagaaagatctaatgtagataattgaatggtcgattagctattacgattaagggactagcaaagtggctaagcaagttctttaaactataacatttaatcgaatgaaaattgtcaaaagatcgtcggtggaattctcggctacgattttaatctggggggtcaagtggacaaaacaaacgcggatgctttaagtagcaatccgcggagtaaatgaattaagacgatttcaccgaagggtagcaaggttgacgatggcaactccactcttttttacggtcgcaggaagaccgtctctcccagagctggagtagctggtagtgaactttgctatagaagatattggcgatgaagcccgtgacatcgacgatatctaatcatctgaatcacaaccaacaggggatggttcaaacattatacgacaactcccaaaaccgtaaaaaaaactttaccctgagtggcgagaagcaagatgattctcaatggcggcgaaccattggcaggaccatatcacaggcacatcctagggacctaatgtacttaaccttatattatttcccctttggaagtctccagtgttaggtgaaaatctagcactggggatttttgatggattaactaatctgaaggtaaataaaaaagccatcctgctgaagggatggcgtttttatgatagctatttatactaagacatgcgaatcaaagacgttaaaacgtcggatgacgtattgattgcgattatttttgaccgcccatacttcaatagctgatcccatcttggcttgttgaaaaaagtttagagcatgggtatgaatcagcatgttgtagtgctgatcttgcatattcgtcagggtaaaccgaaataaaatgggagagtaactgatacttttaatttcactagtaataattccgcttaatttttccatataatcgacctctttttgataagtaaattatacgaacaaacgttcgttttgtcaattagcaagcggactattttggaatcaaagtgggcgttaatttaaattagacgtagtgcaaagtaacaccactcaagtaaagtttgcctttaatataaagggttggacctgtaccagaattgcgaattccccgttcatcaatgccggacattacagagttaatatcagtcacgatattccaatcgtgggggagatatagtgtgatgtttcccagttggcaattgatgttggcagtggcagaatcctcaagatgggcttgatcaaaatacaccttagtagttcccatgtagttatttatattgatgcttttcaaatcttgagattgaatataatgaataccactgctcatgctagtttcaatattgattacgtcatcatcagcggactgcgtactttcagtataatcgtagtctgagtgatgattaaaaccatgctgaaattttttccatggtgcatgcttttgccaatttcggcggtaaggatgaaaaattagtgatagaccaattgttagaagaacggccgctaacagaatggtccatggcacgagactactgataccaaggggtttaccatatagcattaataaaaatgcaattgaaaagatggttccagcgatggacaagtggacgaggttgacgaccagtgcagcaattaaaaatacagaagcgacgacggagaacggatttaaggtgaacgccgtccaccccatctgcgttgctactaaaacagccgcagctaaaacgaataatgtgccccaaaaccattgtgattttttcataattaattacctcaacttttttaaatgttcttgtaatgatttatagtaccgacgagatgcataaacttgtttatgcgagttttgaaattggactaagcagttcgacaatgatttagttaacgctaagattttattaacattgacaatacaagatttagagatacgaatgaactcaataggaaggttttcctctagctcgtatagtcgctgatgcgttgtataaagctgattttcagtgtgggcacggacttgtcgatcctcggtctcaaagaataaaatatcgccaacttctaggtaaaattcagtggaaccggaataaaaggtcataactttttgcgtagcattttgtctttttattaattcctgaatttctgtaatgtttttagtaaactcgggcgctcgaataatgacttcgccctctttaatatttggatcaatttcaactcgcattttcaatgtcgatcatcctttcctactaagtacatcataaaaaagagagcgggtaaatgggtaagggttaagtggttggattgagcgactaggcggtcaaaaaaactgtaagaaaatgattgcagcagaatctagctgaattggttttcttacagtttttaagtgcttatttagaatatttttgaccgagcagcatgcgacccgacatggttcttaaaattaaacctagatgggtatgatgaaggtcatcgccagttttacgatatagcggttgaagttctgaattccaaagggcaaaagttgtcgtaaatgttggaaatttccaatagcggtgccggtaacttggaatcttaatccagcgcttttgcgcaacacgaggttgatcgacgtattcaagatcgatgtgagcctgagactttgctgcaggtttcacgtttttttgagggcgtgcggccggaaccgcagttggcaagcggtgctgctggagccttttttgaattacgacccgtttttcttccatggtcagcggcgctgccgtgggcgtggcgctcggtaacttggttactgttactgggtgcgattgaaccggcttaaccacaggtgctggttgaggaatcggatcggcttttttaggtgtcttgggcgaactactaggtttttggggtgcaagaggttgcacgacatccgacttaggttgagctggttttttagatcgcagatgaacatagtaggtcaccgaatcaccattgatctgatcaaaatcgaggcatttttagggaaatcattagtagttaacgtatatccttgactttcatattccttgatcttacgggttggatcatacgtattggcctgattatagtagaccgaaacttcttttgaaagcagctcttgatgagtgcgatcatcaatgaattttaccgtagcttttttatgagcccgttcgtatctaactgtatagtgcaaatcggaactattagcatcgatcgtttgttgatcaacctgttgatggctagaacggggcgcattattaaaagctacgtgataacccttgatggttggattagggatggcagctaaagtagcttgattgcccctagtccaattctgctggtccacgggtcggccttgttgatcgagcgttaaagttgttttagttcttgaaaaataagtaacagttgtgtgatgaagcgcatctgctaccgtcgcaaaggtaacgggctgagcgcgatatggattagcaagagccttaccattttcatccacatactcaacgtattcgttgatagttttggtggtcaagtggtatgctggagcgtatacataagtaactataccattgtctccatgatggcttaaaataccagtggcgggaaggctaccagctcccatgcgaacaaagtgataattattaatactttggggatgggtagtgtagggccggcctacaaaagggccgaatggataatcggcagtcccggtagttaagagtttccccgtctgatccacataccgtacggtaaccgtagcgtgatggtggtgatgatgatggtgatatggtgctgtagatggcggattagtagccgtcgcactggaactttgagtagcggatgaagacgccgtggttgtactgctagaactcgtagccacggtcgttgaattagcgtccgcctgataggattcagcattagatggggaggttggttttggagtaggtgttttagccgcccaagcggtggtcgaaactaaaaatgtattggtaacgataacgatacttaacacaacggtaattagccattttctactcttgttgtataatttggtgtagtgctttgttcccaagatgatttacccccagacatatttttagagtctatattttgatgcctttaaaaatattgttaacaaatcaccttaaggagttaataatatgatcgagaagtttaaccgattattggacgatgagcagcagttggtcctccaactagccgaactgtatatccatgattctgagaagaggctttcgataggctatgttcaagatgagctgggagttagtagacatcaggtgctgggcgcgtttgatttactaaaatcaacgattactgcacttcgtattgaaaacattgatttggaatacgatggcaagggagtcctgtcaatctatggtctaacaacaacttcaatgaaaaccattctggaaaacatggcgaccaggtcaattcgtttgaatatttttataaattctcaactgggaatttacggcacccaagctcaattcctaaagcaattcggaatcagtcgagcaacctattatcgcaatattatttatattaggcaaattctgtcggaagaactcttcaacaagacccatcgcaatgaagaaagtgtgcgacagactatttttagcgtgattcatcattttttcaatggaattgatgcgatgccgattgagctgggagagccggtggacactttaatcaccgagttgagtgagctaaaatccatgcatttaagctacacagaacggcaacgcttgacgaattttttgtttgtccaaactaagcgtattcgtcagggaaatgtggttaaaaagattgtcgataaggattgcgctaaggaaaagttggattttctagagccactgagagatttatgggggttagaagagcctgatttaatccaagaagcttggtatctgaacatttattttatggtcaacgaactagcaccatttgaaattgaaaagtgtgggaatcagccgccgttaaaagtaattcaaactttggtggaaaaacagctcgattttttgcaccaaatttttgaagggttagaagtagacggccaactagcagagattcgacaggaactactggaaaccaatctcaaagtattttcgccattttatttcagtgagacgtttgtagatccaactaaggtgccctttttcagtgaaacttatcctgaaattgacgagatggtgaaacaaattttggcgtatgtaggcgagcaacgtaaattaaggcttgataaagatacgttaacccagctatattatacttacatgttaattttgctggaacatctaccgattcagttggtaagtagtgtcgtgaagattacggtcgatttttctaatggaaaagtttttaccaagtacatcacgtctcagctacaacaatttgcgcccccttaatatcgaaatttctaaacgtctggaagatgatacggatatatttctatcggatcaacgtttttatgatgtcgattgtgagcaaatgatctgggagtcaccacctttagctgaggattgggaacaactaggtgatttaatcgtaaaaattaaacaaaatgataaaaaaataattaatagctaaccaaagactttttaacggcgtccgctcgggacttactgttaaaaagtctttttgaattttaaggtgcattctcacgattttaaaattagatgaaaaacgcgaaacatagaacccctttacgataagagacacggattatattataaaaacgtgctagtccttgattagcacacggggggatcattctaatatcctttttgtaggataaggaacgacgggaagctgtgaagaaaggtcaaacgtacgatttttgaggaatgttcgtgcgcagcccgatgaatcacagcttctttttatcacgatggtagatgaatgagttattggtggaaggcagaaatgggcgcaaagaaaaagatttggttttgggtgatagtaaccttgcaggtaatatttgttttaaaaatggtacatgatacatacttcaatgatcgttgggcaacgaggtacaatgtccgttccagagagacggtagttaaaaatatcaattacgccttagaaagcaatgattttagtggcaccgccttggtgattcggaatcataaagttttgttgcataaaggctatgggcaacaaaatgcttcacgaaaaaatggtgtggatactttgtataacatcgcctcgattgaaaaaagtatgacttccgtgatggtagcgaagttaattcaagaggggaaattggattatgctacaaaactggctgaattttatccgtccattcctaacgctaaaaatatcacgattcgtaatatgttgaccatgacctcggggttagaagcagcgagtgatccagaaaaaacactgagtgaaaaagcattggccaactattacgctaagcatgtggtggtcgatccgcgtaagggatgggattatgatgcgattaattttcatctgttggcgggaattattacgcaactaacgcatcaaagttacagtgctagttttaatacgttagtcaatctaaaaaatcaggtaaatgtgatggtgatgccggatttttcgaatccccaagtggccgtaagctaccacaaaaatgggcaaccgttcgccaatcctcgctacgtctatcgtaatgagattggtaccgggagtttttttatgaccgccggcgacctttaccgttacttttcggccttggtcaatggcgaaattttaccaatgaagaccatcaaggagttgtttaaaactgtcccacatagtgtttatgccggtggagtctatcacaataagctttactaccgcgggcacggcatcttgcagggatatgaaccttcaatcattttcaacaaaaaggccggcaatgccgtcgttttgttgggaaatcgcagaggtaaaacaacgacgatgaagcgaccaatagtatttattcattggtcaatcaaactccatatttaggtggaaacacgtattaattaaggagaaggtaagttaaacatggatgtcacggcaatcgtacctgcccataacgaaggtgcaaatattgaagcaacgattaaagcgttaaagcaacaagttcgaaaagtgattgtggcgtgtgatcactgtacagatgatacttatcaaaaatcaatccaggcaggagcggtggcttttgaaacggttgataatcaacatcgtaaagcaggggcattaaatcaagccttagaaaattacgttgattggcaattacccgaccaatatattttcatttgtgatgctgacacggtgattgcggatgattggattgaacgggcccagatagcgattgatgctggtggttatgatgcggtcggttcagtgtttttcggggatgcggatcgaagttcgatgatcgaattttgtcagcaattggagtggtaccgctacaccaatcagattaagcggagcaaaaaagtttttgttttaaccgggaccgcttcgatggtaagtgccgagatgtttcagaaagttaaagctcgcaaaggtagtttttacgacgaagactcgattaccgaggactttgcgttgacgattgatttaaaagaggcgggggccagaatcatttccccaatctcttgttactgcacgacggaaattatgcccaactggcgactactatttttacaacggcgacgctggtatttaggagcgttgcagcaaatggttcgccgaaaatgggatcgcgttttatttccatacgtttttcaacaattaatgttacttatttcagtcctagcatttatgggactgattgttttcaccggttacttaatggtgcaagacttgattatttttagtttcttttggtttttaattggagtgatttttgcagtcgagcgggtgattacgatttggaaccaagatcggcaggcaaagatatttgcattaatgatttttccagaattaatttatagtttatttttacaaattgcgtaccttggggcgctggttcagctgttaagcgggtcagcgggtacgtggaatcatctagattaatgatttaattcaatagggggacgaaaaagttatgtattcaaatattcaaagaagtggtgtagcttttgtaagcttaagttgggggttcatgtatcaccttattagcaacgctctcgatttttttcgcaattcttgctgtgggggacgattattagatgcatttggtctgaaaaacaccaagatccaaattggcaataaatgattccttttaatatttataaatcataaatagaatggaagcgagattgggagaggttttcatgaataaaaaagggtttctgatattggtgatggctgtgctatggttttggggcatcaatcgtaaaccactcagtgttcgagcagcaaccgattggggcgaacagtttattactaatgttgagttgagaaatagcaaagataaagcgcaaactacttttggactttacgataatatgaagattcattggaattttaatattccagtttctaaaagagtcacagctggagatacgatgactctcaaagtgccagatagtttgaagttagttagtaatgttaaatttgatgtgactgatgggcgaggtaacattattggtaaagtgcaagtcttgaaaccaactaataaagttaaaatcaaattgacagaatatgtggagcattatgtaggtggagtgaaaggtgctcttagtgtccgaacgcaatggaattattctaaggtcgatcaaaaccaagtgcaacttttaaattggggagctgggcgggcggctcaaattaagataaaacccaatggtggtccgaatccgaatgagactttatatcagtggtcttggtacgatgtgaaggaccccacgttgatacattggcgagtgcgcgtgaattatgctaagcaaaatctcaatcaggtcgattgtaccgaactaattggagatcatcaaaagcttttaacaagttccatcgaagtcatgggagtggcttttgatgaccaaggtaaggattttgaggtaacggcaacctgtcctaaagtgaaaatcatgacgaatgggacgaagggttttacggttggattaggaaagattaagcagacctacgtaatcgactaccaaacgcggatttcctccgtagatcaacatcgccattatcacagtcaaggagatttaacggcggccaacctgacctcccaaaggattaatacatatgttccagaaagtaagggcgttggaacgggacaggggtggcaaaacagcacggagaagttaagtaacacgcagtcaattaaaacgggatatatccaaaaggatcgcccagttttcttagccgaagaaaaacagactatcattaaaaacttttcaatggtcggagcgagcctattggccctgattgggtggttcatttatcgtcgccggaaatgatgtcagaaagaacttcggaaaagagtaacatctaatacaaaaaaagacgtccactgtgagatgtcttttttgatatagcatataaaatattttacatagagtaattaatttttatgtttctttttggaaacgaaccagcgttgaatcacaatcaaatcggcaatgacaagtaaagctgcggaaatcatgaaagcaacatgcattccgaagataaacagttgatcgttgccggttggataagtagtaatgctacgaccgagtttggcgcccattactaagaaaagcgatgatgtagagatactaacgcctaaaatcatacctaggtttcgagctaacgcattaacactgccagcgatccctagtcgattacttggaacggcggacattacagatgcgttattcggcgattgaaacataccaatcccaattccggtaacaattgaagtaaaaataaagtaccagaacggagtgtccaactgaaagcccataatcaaaaattgggctaacaataccagcgtaacaccgataatggtaattttagttgaattaaatttctcagctaagacgccaccaatcggtccaaaaattaccatagtaagtggaatgattgaaagtaggactcctgaaagtccagaggataaaccacgagcattaactagatagtaaggcatcaaaacgtcatcaaatttaatttcaccatgagtaggttcatagaaacgttctaacaaactaaatatcgttgatttaccaccgcccgaaggtccggcaaaggcaattacttgattaggtttagctttaaacgaaatatcttttaacaccgtttcttctggcgtatcagcgtacgcaaaatcgacatgttcaacttttaaattcttatcagctaaatccaaagtttctccacggttaaaatcttctggttcttcttcaagcaactcttcaactcgtctagtagaaccggaagccttcgccatttctgaaaataacgtcgcaatgatgggcatcgcaccaatcaaattaaataggtacatcagaaaactcatcaaagtaccgatttccattgccccaatcgcaattcgatgaatcccgtatgctaacaggccaaaaatcatactcatgaaaaccatcatcataattggttgcattgctgcatcaaaaatagcttctttccaattttaaataaacgatttatttcattatcagcatgttcttgagcttgattttcggcattcgaagtctttactaatctaatttcacttagtgtttcactaacaattccattaaataatgctagagcatcttgtcgaatatgaccaactttagtaccgaaagccataactggaaccattaaaattactactacagggacggcaattaccatggctaaagtcatgtgccaatccatccgaatcatcatataaatggtcccaactacggtaataatgctggcaagagtttgaggaaaagttacggctagcagttgcttaacttgattagtatcgttgacgagccgacttgaaatttccccggccttgacggtatcaaaataactaacttttaaaagagtcaatcttttccacaacgttttacggagattttggataacattctccccaaaaattcccaacacagtgccgccaatcgctgaaaaaatagccgatgcaacaaaaagtaaaactacttttcctagcaatgcataatctacacccttggaaaaattattaactaaggttgaagctaattttggaacgtatacttggactcccgagctaatagctaagaggaatactcctaaaaataaaaggacgtacttaggactggttcgcttaattaatccaaaaaattgtttaaaattaaatttagtatgatccttgcgaatcgtatcattgaagcgtgcattagttgccaattttaacgccgtcctttcttccaaccctcaaaaccaccgaaaccgttaaaatcacctggttgcattctaccaaagtgattgtggcgcaacatttgttctcgagctctttcaaaatggggactcatcttgccaaattgtgcccagcgttgatcattatcaaatacttcattaagcttttcactaaattcatcgctaccgatgttattaaccatccgttctaggtattggtctaaatattctagttcactatcagagaaatctttgaataaaacgtcttttaaagtattcccaatcgaaccatgcgttttcaagctttctcgacctttatcggtaattttcacaactgtcacccgtgaatctttaggtgatttttctcgtagaactgtccccgctttttcaagttttttaataatttgagtaacactagaaggcttgatatctaaatattcagaaatgcgtccaggagttacatttgtttctttagccaaaagttttaaggtttccaaagcattatccgttttttcttctacgcggttagcaaaaactaaaaaaggttcgtgactaactttcattaagttatctaaaatttcatctttattcataataatggttcctccattttattaattgatttatttagtttcagttaaatttaacaaactaaatactattatcatttagtttgtttgtaaacaataaaactaaatatttttaatgcacaaaaaactctcaattctattcggttacaccccgtaaaattgagagctttaattttaaaactatttcatccgaaaaaggcctagttccggattcatttccagttacttaacttttaaatcttttaattgcgcttcgacatcttcaattttagtctcaacttgtaacaatgccgctgccgtataggcactttcaaccagggcggtgtcatacaacttaacttctttatccgtcatttctatcgccatttctaaattcattttggcgcttcctaagtcataaaaggctaatagcttagtcgcagaattatcctcaaatgcttgtataattcgttgcatatcggttcccacatcaccattttctagcccaccagcaatcgtaactggaacatctttagcgacttgttcgattaaacgtttaacgccttgagcaatttcactaacatgcgaaacaattaccacaccgtattccataactattcctccacttctagtaaggccttcaagaggtaacctgaagacatggcacctggatcaatatgccctactgaacgttcccctacataagaagcgcgccctttggtagcaatcatatctttagtagcttcgacggccttatcgacatcatcagcagtaaaatcagttttttcagcaataggagcccatacatccaccattgttttttctccggtttctgctttcccccgtttcttaattccagctaatgctgctggtaataacgcactaacttcaccgtctccaactttggccatttccataaaagcagtcccaaacaaaggaccagaagctccaccaactttactaattaagctcattgcgattgttttaaaaatagctggaacgtccgtaaaatccttatcggcgatagcttccatgactgcattcatcccacgcgccatattgtttccatgatctccgtccccaatgggtgtatccaattcacttagataatcgtggtgagcttgaatttgttcgttaaatttggtcatccatttttttacattttcaacgtctaacatactatttctctccatcctaattaaaattaccaagcaatggtatctgtggcgtaatttaggttttcaacaatttcgtcggataccttaaacaaggttagtgaaattccggccatttcaagcgaagtcattaaactacctaccttggtgaatttaacttccagacctaaatcagctaatttatttaaaacatcgttcataaagatgtactgctccataagtggggtagcccccattccattaactaagacagctacttgatcgcccttttcgaatttgaactcttgattcaattttccaaccaattcttctactaaggccttggaaggttgtaacttttcccgccgatagcctggctcaccatgaatacctacaccgtattcaatttcatcttcacccagtgtaaatccaggtttacctacttctggaacagttgcaccacttaaagcgactgcaatcgtcttgatattaggcaaaactttttgggctaattgttctagttcgtctaaattggctcctttagccgcggccgcacccaaaactttatgcatgaagatagtccctgcgacgccacggcgtccttgggtataagtactgttttctaccgcaatatcatcatcaacaactatcgatttaactttaatatcttccatttcagccatgtcttgagccatttcaaaattcatgacatctccagaataatttttaattactaagaatacaccggctcccgaatcaactttcttgattgcttcaaagatttgatccggagttggtgacgtaaacacttccccacaaaccgccgcactcaacattccatcgcctacaaatccagcatgagtgggttcgtgaccacttccaccgccactcacaattccaacttgaccttggatattttttaagtcatgacgataaactacacctgtttctggaattctttctaaatattcggggtaacttcttaccaatccttgaaccatttcatcgacaacattctttggatcattaatgatttttttcatgaaaacattccctcctcggtaacttttttcgtacaattaaagcatagtagaaagcgattacaatcacaagaataaagcctaaaaagtttaataaaaataaaattctcgtataatgaattatatgtacaaaccaaggagaacgatcaaatgattttagaacgcagcaatatgtttaataacgaaggtatcaataaagaactcacgcgtgtaattggatctgaacacgttcaagaatttagcaacttagtacgttactatcgactttgtcagtccgccgtaaatgaaattggaaccaagcttgaaaacttggatggtgaatatcgaggagaatatgaccataatcccattcatcatatggaacaaagaatgaaaactataacctctctttttaataaggcagagaaaaaacatttagaccgtgatatcgagtctattaaacaaaacatctttgatattggcggaattcgcgttgttactaactatattagcgatgtttacactatccaaaaaaatctgctttctcaaagcgatattacactcattaaaactaaagattacatcaaaaatcctaaacctagtggttatcgcagtgttcatctagtagttagtgtgcccgtatttttgtctactggtccggtaaacactcctgttgaaatacagattcggaccgttggtatggatatgtgggccagtttagagcataagcttcgctataagaccaacgttgctgacgaaaaagtagaacattttgaaaatcagttagtcgaagatgctaatgaaatttttaagattgaatcaaacatgcaaaatatttatcgtgaattatctgacccacgggtgtttaaagatgaaggataaacatcccgtcacgtgtttttatggagtcccaatcaagcttgataattccggtcattacatatttaatactgaaattaaaatccatgcctggcggaatggcaaacacactaaaggaaagtttctgaaactcggtcaattatttttaaccgagaacaatttactagtggcaatcgtgggtgcaactaaattaagctttaaaaatcgccataattttgttcctttagaacgctttactaaggaatttatttcagatgaaatgctggaaatagctatcaaaaaatttaaagaggaggcagtttagtgcatgcaaactttgattatcgtcgcacatccagaacttgcaaggtctaatactcagcccttttttaaagcggctatcgagaatttttcaaatgtaacttggcatcccttagctgcagattttaacgtcgaacaagaacaatctctattacttcaaaatgatcgcattattctagaatttccgttgtactggtatagcgctcccgcattactgaagcaatggatggacaccgttatgaccactaaatttgccgctggtcatcaatatgctttggaaggtaaagaactaggaattgtggtttcgactggagacaatgggaatgctttccaagctggggcagccgaaaaattcaccatatcagaattaatgcgtccttttgaagcatttgccaacaaaactaagatgatgtatctcccaatattggccgtccaccagtttttatacctagaacctgatgcccaacaacgcttgttggttgcttaccagcaatacactacgaacgttggtggaggtcactttaaagaccaggccgcttggtttgaggcagaactacaaaaacggattgatcaacatccatcacattctgagcaacttcaacagattttattcactattaaagagcgtcaggatgaactcgacgatttacaatggaatttgattgaaatgaaaaaagaggaggatgtgtgatggatgatcaaaaatggttaattgaacaaattgaacagctccgtcaatccgcttcagactatcgagaacagtccttttatctaggattaaaagactttgttcgggaacaatcgaaaagaatcgaccaaactcaaagagaattagacggaagaatgtgggaataatttcactaagacaaatatattccagcaattcttaataagtaggcatcaaaaaagaccatgacattgttaattgtcatggtcttttaaggtttagtgttttttatcctcatgtttcttgtcgtcctttgtgcgatctgaccactcttcgcgagttaacacatctttgacgttgagtttaatctcagcgacttccatgttggtcatctcgttcactgccgcagtgatttttgttaccattttatcaaaaatagattgtgcattcttaccatattctagtaaagcatccatcttcaatgaaactttttgattttcgtcgtcgatatctacattaacacccgttgtaggatcatcgcctttagaaattcgatcagtcactttttcaaaaatattaccttctaatgaaagtaccccatcaacgttgcttgctgtttttccagcaattttagctaatacttcatcatcaaatgttagttttgtttctggttgtgctactttatccatagttatagatctcccttcaaaattttcgaagcttatttagcttctggcttaggttctaaatcagaatttggtttgcggttattttgttctttccactgttttttacttaaaacattgtttacgtgaaaatcgagctccacaaccttcaaaccagttagacgttccacttcttcgctaactacatcacaaactcgagtaaaaatttcacgaatatcatagccatactcgacagttgcattcatctcaagcgccacctgcttttccccaacttcagcagtgattccttgagttggatctactttacttcttaacttatctgtcaaactatcaaatagtccgccgtcaaaggaaagaattccgtcaacttttctcgaagctagacccgcaattttttcgataaccccttcatcaaaggttaagcttgcttttgcaattctaggattgtccatgatttagcacctcctgaatcttacgacgatttttccatgcaaaccataaacttgaaacaaccatcattccaagtaatgatttcaaaggtttattacgatccactttctttgccattaaacgtcccccctagttcttcttacgatcaatgttcaaagctgccattagttctgaaattgcctgtgataaaactgacttaccatatctggcacctaggtatccaaggattccaagcactccgaccaacactgcgctgccaaatccgatcgagacccagacaattccgagaatcatcgcaactaaagctcctaacaattcgctactcatctaaaatcccgccttcctatatgactttcagtgacttactggactgcttacgcggaatgatttgaaccttaacatggctcttcattcctaaatgtctttgaatactatcttgaacagtttcttgaatctctttggcattcacatcatagttcccatccgatatatcttccacgcttacttgagcttggatccgatcatttccacggacacgtactttggtttgaatattacccacttgatgattctcagcaattgacttatcaacaatttgttccatcgacttcttaggaatggtcaatttgcctcttccgccttgcaatttcaaatctttctcgctagttcgactagatagtgcaataattaacatgactagtgcaaacagagcgacaataaccccgaatacaattgcaacaacttctgtaaggcggctatttgtggttctcatcgattcaaaaaagtcggtaagataaggaatgaacatttcacttgaaacgaaccaaaccgtttgaatcagggtaattactgccatcaaactcaataaaatcttactggttcgactcatgtaatcacctctatcccttcttacgcattccgaagataacagatacaattacaactaagataactgctccgataattgacggaacgagcgccatacctgctaaggaaggtccccatgttcccaataggctttgtcctaaccaagcaccgacaagtccagcaacgatattgccaatccagccagccggtaaatcacgactagttagtgctcctgcgatggcaccgataataccacctataattaatgaccataaccatccaaacatataaaacaactcctttcagtttatgctgataaccaataaacgctattgcttgctggttcaccattaggatatcatgttgtcagattgcatatcaaagaatatgcctatcattttcataaaatatacgatttgaggtagcactttcttttttcaaaatagcaaaaaaagcccacgctatgctgagcttttcggttagaactagatttaattcactaaaataaattttttcttgaaaaataagctgtttttatttaccaaacgatattttacttggttttactagctaatttaacaattccggcagccataattagagctccgcctgccaaattaagtacgccaccgacaatttctaaaactccactacctttttcgttcttacgcattatctttcctccaattattaaaaaagtgctcgaaatattgtaagcacttactattttaactattttgttttaaacttattatataacttttagaaattaggtgactatagtgataaaaatgattgctacggatatggatcaaaccttccttgacaaccaaaatcaatacaataaacaacgttttagtgaaatttttcaggaaatgcaacgccaaaatattcacttcgttgccgctagtggttctcaacatgagcgccttcaagcgctgtttgaacctcaagctaaacagatggacttcatctcccaaaatggctccatcatctattccggcaacgaattaatcgatgtgcaacaaatctctccaaaacttcttcaagacacactagattcgattaaccaggcttttggtccagatgaagttttaattaatatttgcggcttaaatagttcatatgtagatacaaatactaccccggatgttatgaacttcatcaaaaatttttacaaagaaattcaaactgtcgatgatattaatcattttactaagagtgggattgaagatccgattgtcaaaattgctcttagctttgaagatagtcctaatatcaatcaaaaaattgagcgtttacgaagtcttctagatcctacgttggggagtttaagctcggggttcaatactgaactaatcggtttcagtcacgtagataaatcaactgcacttcagcatttaatgcaaagatataacgtaaacgcagatgaattggtgacttttggtgacaacgaaaatgacttacgaatgttacaaatgactcctaatggatatgctattcaaaatgccttttctaaggttaaagcagtagctaaccatttaactcgatatgataatgaacatgatggtgtattagacaccctagaaaaactattataaaaaatcggcggtcaattaacttttgagcttaatttcaaaagttttgacaacgccgatttttttagttaaattcacttaaaattgcttggtacgccacaaccgggtcctcggattgagtaattggtctacctaccacaatagctgagcttcctgctttggcagcttccgcaggagtcatcgtccgtttttgatcaccctttgctgctccggcaggtcgaattccaggtgtcacaaacagaaaatcttctggaagttggggttttaaataactaacttcgtttggagaacaaattacaccatctccgccagccgtactagtcaattttgctaggctaagtacttgatctgccattggtaaactaacattctgttcttcacttagttgcttttctgaaatagaagttaattccgttactgctaatagtttaggcgttggtaagtctacttctctagctccagcaaccaatcctcgtttagccgctcgaatcatatcagaaccacccatcgcgtggattgttgtgtattgaacccccattcgacctaattgcatcattgctttttctaccgtattaggaatatcgttcaattttaaatcaagaaagatgtcatgccctttttgacgcatatctctaacgatttcgggacccattccgtagaagagttccattcccaatttaatgattaatttcaaatgttccggaaattgctccaagaattggttaagttctccccgatctttaaaatctagcgcaatcataactggtttttccataaaaactccattctgaaccgctcttaacatcaaaaaacaccgcaaggtctaggtatgctaaccagcacctagtttgcggtgtattcgttagcttatcaatctctctggatcgatttaaaacgactcgatttatttacatttatgctacttgcctagcctttgaatgtcaagatgctaaaaatggtaaaatggtattataaattaattaaggagctcaacatgattaagagtgtagttcatgatcaacaaattttatctcaaacgtcaattcccgctaccaaacaagatttatccgtagtaatggatttgatggatactttaaaagccaatagcgaacgttgcgtgggaatggccgctaacatgattggtgttcataaaagaatcatcgttgtcactatgggaatgatgaacgtccccatgatcaatcctgtcattctcaaaaagggtaatccatataccactgaagaaggctgcctgtcattaaccggtgaacattccaccactcgttacgacgaaatcgaagttcagtatcttgatttagaatttaaaaaacatacccaaaaatttaaagaattcatcgcccaaattattcaacatgaagttgatcattgtgatgggattattatttagttttggagaactagcattaatttgctagtttttttaatttatcaccagtttattccaaacaaaaaagcccatccattttagggggcttctccattaaatatcttttagcataattaaatcacgttgcaaatcgttacctaattgaaaaacatgttctccaacttggttaaatccttgagtttggtaaaatttcttagcagcttcgttatgctcccagactcctaaccagattttacgtttgtggttttcttgtgcaacctcaagtgcctgttgcattaatctagagccaattcccagacgtttaaattgctgacgcacgtaaatccgctcaacttccaaagtgtcgggctccattttttctgactgagcttcatctatgttgacttttaaataccctacaagctgatcagcttgcttagcaaaaaagaagtaggatgcatcattagtaatttctgaagttaactgtttgaaattgtatgctttttgatagtattggtctagatcttcagaactgttatctgcgccaaaagtatctccaaaagtctcaatacttatcttttgtaacgcttctacttcttcaactcgtactttttgaatatcaattgtcattcaattcacctcaatattttctatgatgaccactttttacatagttccagtcgatactaacatttcgttcaactttctccagcattgctttcaatgctgtagcttccgcatccgtaaatcctgctagcgccattctactcgaatagctattttcgcgtttaatcgttggatatactgccttaccttgttcagtgggatatagacgtttaatcttatgattgtcccgatcagctccacgtgtaataaatccatccttttccaacttcattacggctcgagctgcggttgtccgatcaactcgaattttttcagctaattcaccctggataattcctggattttcacatattcgaaccaaatataaatacttgcctttggttaaatttaattctttaaattcaatattagcaatcgaatccaattctcttgaaattgatccaattgatcgtaaaatatcttccataattacttccctctgagagtattttactttaatttagttgcaaatacaacaaaattattttttgattgcccgtatgatttgttcgacaattaaatttaaatcttttgtttcgtttgaattaccgatgaatcgatgctgaataaaataaataaaaatctgtccaatcatgattctcattacggctggaaaatccaattcagatcgtaattgtcctgttttatttaagttctctcttacattttcaatgactgattttcctggttcatttatcactccaaaaaataaatctcgaatatcacgattagttagcaactctgtaattaaaattagaattgcgtcttcattgtctcgtacaaattgataacggttataaacaaagaaacgtaccatatcttccaagtcagtgaactgcctcaattcatcaataaaactatcccgaaaaactggaaataaatttataaaaactggtttaagaattcccatcagtaaatcttgcttagttttaaagtatttaaatatagttgcctgactaatttcagctttttcagcaatttgagccgtcgaagttccattaaatccctgtttagcaaataaatctaaccctgctaaaagagcttttttctggcccttaggaagcttttgctcatcaagccacgttttataattatcaaatatgattgcactactcattatttacaccttccgatatcgtttcaatccaacgatatttaaaatagttaagataactagaaaaattaataacactccaatatctccccccaaagctgaaagtcgggctcctcgcataataatattactaaccgcatcgccggcatacttaagtggaataatataagatattttttgaacccaagcggccatcgtatctaacggaataattccagcgaagaaaacttgaggtactatcacaattggaataaattgcaccatttggaattcagaatgagcaaaagtagaaagcagaattccaaatgctagagctactaaagctaatagcaagttgataacaataatgctcccaatattgccaaccacttccactcctaataatccaatagttaccaatacgatcactatggtttgtaatatagcaattatcccataacttagcatatagccaaatacaatttcagaacgtttaactggagtcgctaaaagtcgatctaaagttccacttgttctctctttcaaaagcgccatcccagaaactaggaagacaaagaagaaaacgaagaagcccattaaaattggtaaaatcttatcaaagaagctggtgttagcatcaccatacacataatgatttttaattttcggactagcttgagttgcgggcatgcttttggttttaactgattttttagtaactaaagctaacttcgtttgaagttcatttaaagcccggttactctgttctaaatgttttttaagctgtttaatattattcacagtaaccgcatttttgaacgccatcttagtagtggctgttctagttgcatcagtattagcataagttatattaaaattattgccgtctttttcaataattgcatctgtcttttcagcttttaatgctattttcgccgatttttctgaggcatattgatgaatttttacatgtttaattgtatttaaattttggttcagctcatgtgaaatacctaccgttcctactttcacatttgttgtaccgctattgttaaaaataaaactcattaatactaaaattaaaattggagctaaaaacattaacgctaaagttcgtttatcccgcattaactcttttaaaacacgatttgtaattgcaataattctcattattattctgctccttccgccttcaaaaagacatcttcaatagacggtacatcatattgttgctttaaatttttagggctatctaaagcaatcacgtttccgtccaggatcagtgctacttcgtcgacttgttcagcttcatccatcacatgcgtggtgattaaaatgctttgtccgttattttttatccgctttaattctcgccatattttccgtcgtaacgcggggtcaattcctaccgttggttcatccaaaatcaataacttaggattacccaataaagcaattcctaaagataatctacgcatcattccaccagaatatccttcaactcgtttattaagagcatcttttaaatcaactacttctgcaacatgatcaatttgcaattgtagttcacttgatttgatacctttcattttggcataaaattttaagttctcaaaaccggttaaggtcatgtacaatgcgtccgtttgggccatataaccaattttagataataatttacggtttggcattttagcctcaaaaatttctgcggtacctttatcagccacttccatgcccaacgcaattttgataattgtagattttcctgaaccagagggcccaatcaatcccacaatttgtccctgctgaacattaaggttgatattttttaaaacattttgttttccaaaacttttagcaatattttttaactcaattattgatttattcataaaaattctccttaaccgaatttggtgagtaattactcacttactggttggagtataaaatatatttattttttagtcaataacttctaacttcatttgaagttcaattgggagaaaataccgtatcaggttatgctgacaaatttgtccaaaaattcggattaaatttgcaatctaccctaaaaataaaaatgctcatcgttatctttttgacaatacttttgatttgttatcgttaatcccactacatccggcttttgctatctttcgaattggtcgagttttcaaattaattcgcagccatcatttattatggcgttttggattagatggaaaattttctaagaccgttcatcggtttatctatacctcgggcttcttaaacctttttaccgtcagtatgattattttagttttaagctcgctcctttattctgtggtagaacatatttcatatccttcagccctatggtgggccattacgactgccaccactgttggttatggtgatatttcacctaccaccaacattggtaaatttattgccgcctttctaatgattggtggtgttgggttcattggtttgctcactagtacaattacaggattctttacttctgaagctgatacgcaggaagatgatatgaccaagcttttcaaaaaaatcgatcaacttgatcataaaatcgaccatctccagcgtcagctcaacctagaacgacgtaaaaatacgcgaaaaaaataaggattaacgttttgagacgaaattattcgcccagcgttaatccttatttttttaaattagctattattcttcgctacccattgccttagcaacaaaagcagcaattgcagcacctaataatggagccacaacgtaaacccagtagtgagataaagctgaaccaccaactaagattgcaggaccaaaactacgagcagggttcaatgaaccgccagttaagttcaatgatgcaataatcatgaatgctagcgttaatccaataattaaaccagcaaagttagcattaccatactttttacttgtaactagcaagataacaagcacaaataggaatgttaccaaagtttcagttacgagtgctggaaatgctgaaatttttgcaaaatcagtttgaccaagattgctagttgaagctcccatagcacttaggaaatacttaaccattcctgaagccaggacagcaccaataaattgtgaaataacataataaatagcatctgctccactgattcgcttattaatccacatacctaatgtgacagctgggttaaagtgtcctcctgaaattgcaccaacagagtaagccataatcgtaacagccaaaccaaaagctaatccaattcctaaaacgtcggctttaccaattgtaacagcggcagtaccaacaaaaacaagtacgaacgtaccaataatttctgaaacatatttcttcatcaataatctctcctatgcacaggcaaaaacccgtacgaaaattgtataccactttaaccattttctcaaataaaatgtattaatcttgagcgtatctttttcaattaggtatacatttatgatagaatattgatataaacgtaatcaggaggagttcccatggcaaaatttgacgtacatattatcgaccatccaaccgcaaaggaaatgcttgtagaatttaaaagtcaacgacaagacaacgtgcctattcttgaaaaaccaggacattacattcttcctgattacaagttaacacgtcaacgcaaagctttaaaaatccgtaagcatacctacttaactaagaaattccgctcttacgtggcattagactcagcaaacggtcacacgctctggatgcgtaattttggtagtttatccgaagccattttttggctagaaactggtatgaagattggcgatactgatacagatgcgcgttattcgttcaaggagtggcaagaaaaacactttgaagacattgaaaaacttaaagatcaactacgagcaaaaactaaagctagacaagaaaacaaataacttagatgcaagagctgaggcaatttaatcaaccccaatcttgcattttttatacccaaaggagatttcatatgactacagaaaataaaatcttaagttcattatcatatttaagtatcttttttatgcccattctctttcccatcgtcgtatttgccttaacttctaacagtaatcaccctgaagctcatcgcaactccattactgctttttggcttcatttattaccaacaattttagttccagtggccttcttcttaggattattagcaactgggaaaagcttttctactgctaatttgagtgggtcttccctagtattatttggaatcgtcggtctcattggattgttgattttaggaatgtttatttacaatctatatcgcggagtaaaggtctgggtggactaggattattgtccttcaaaaaaattatatgtttttttgacttatttgttgcaagcgcttacagaaggtgttaatatactaagtgaggaaaggaaaagttcctttctaacaaaaacttctcaagtgcctcggttcttaggctgtcagaatctagtggaggggcaaatcagagtaactattgcaaatcgtttccatcatgggtgtacgatgtaaggttttgatgtttaaaagcatcgatgttttaaagtgattacacgcgatggtttcgttggtagttgcgacagccagcttctttaaatgtatgaagtgtaatgttcgaaaagttctacgtcatttaaacattgaatcaagtaggtgtgtccgatgacatgagtaagttgtctaaatgaagacaagattaattagtatcaaaaaaaattagttcaatggaggtctatcgtttcgaagaatatcttaatgaaactccaagaccgtctatttcaccgttagcctgaaacagtgtatacctcatcagatttagagtttgattgaacgatacaacagcagacgttatcaacagaagctcaggtaggttagaagcacgacggctgaacaatttaatacgtttttgtaaagttgaaggtgtaaagatcgtaaatttttccaataaagagattgtcgttagattgggacatctttcctcataaagggattctagtgtgagaagtctagaatcctatttttgtgctctcaaataaaaaacaggaagctcaatcgcctcctgcaatattattgttccacttttcttcgtttacgccctcttccaaaggctaatattaaaatagtaatccctactgctaaataaccactccaccccagatggacgttattaaacattcctggaaatcctgacgtttctgcctcatttttataaataatatagaaagtatacccataagcaattagattaacccaactaccaattttaacaatccattgcgatttaaaccacgcacctaaaataattaatacggggcctattagtaacgcaagcaataccttttgttgccctaaagtttttagaatgctcaataatgtagttggagtgctatatcccgctactacggcagaagcaaacggtccaatataagtagaaatgattagcaatatcgcaccagcgattaaaagtttactacggagtggatgtcccacgtttttaggtttgggtttcacttccgcttgagctgaagtcgctggatcagtaaccatcgtttctgattctaaaacatcctcgggggcttcgaagtcttctgcttctacgtcggagtcacttctagtcacagcttctttacgattttttttatttttaagaccgtgaatccaattagcaatcccatttttagctttctttattcccatccgcaactttaattctgcctgattatcagttggaccaacctttaaagcatagagataaccgcacaaaacaatcagaactaataaaccaatacctacaattctattgagccatattaagactactagagcaatcacaatcggtaaaagtgaaactaacggattatgtttcacccaaagaataaaattcttaatttgtgacaaccactcagaaccggcatgggcttgagtacgtgagtgactattggtttcagcttcttcagtttgaggttcttcttcaatttcttccgcttcttcactgcgttgtttgtacatttctgtccgagttaatgttgaaggctcatttttggcttcatcttcaagcgtcaccccgcaattagggcaaaaattggctttcttaggcaactcttcgccacaattcaaacaatatttcattatccattcctcatttaagtctagttaaaattctttattttctactttaaaacattttttcacccgcttcaaagtaaccatagatttttagctatttaatagcaattctttatactttttaaatatttctattaaaatttaattcttttactaccaaaaaagacctcgaaaatagatttcgagatcttttaataatcactaataaaaattagcgatatctaaaactattctttttcaatactaaaacggttgttgaatagcggactaacaggcttgttttcatgaatcaagcgaattgcttcaccaatcaatggaccaaccgaaatgctagtaattttgtcaatcttcttctcttctggaagttggatagaatccgttacaattaattccttaattggagaattttggattctttcaatagctggacctgaaagaacaggatgtgtacaacttgcgtatacttctgtagctccagcatccatcaaagcttgagctccaagtgtaatggtcccagctgtatcaatcatatcatcaatcatgatacaacgtttgcccttaacttcaccaatgatattcataacttcagcaacattggcgcgtgggcgacgtttatcaataatagcgattggtgcttttaaaaactcagctaacttacgagcacgagtaacaccaccatgatcaggtgatacaactacagtatcctgatcaagaccacgttcgatgaaatggtctgctaatagtggggcacccatcaaatgatctagaggaatatcgaagaaaccttggatttgtgctgcgtgaagatccaatgcaataatgcgtgttgcacctgcacgttcaatcatgtttgcaactaatttagctgtaattggttcacgtgaacgcgccttacgatcttggcgagcataaccataataagggatcacaatgttgatagtcttagcactagcacgctttagagcatcaatcatgatcaacatttccatcaaattatcattaactggagcagatgtggactgaacaatatatacttcgtctccacgaatactctcttcaatattaattctaatctcaccgtctcggaatcggtccaccgacgttttcccgagttctacaccaactgccttagcaattttttctgctaagggcttgttcgaattcaaagcaaaaattttaagctttggatcggaataatgttcagacatgtttgcctccaaaagattataaaatattaagtttattcagtttttccatataatatcataattcattttgccccctaaaagcaagttacttacggttggtttccccgtttttgtgttataaaattgcttattttaaaggaaatacaaccgtcgatgtcaactcagactatatttattgatttaagttaacgaatattatgcttttattgttcttagcaactgatttaactaaaacacattcaaattataattttgttcattcaaatattcttacacacattaataaacaccatatattgacatttaaatacgacacccactataattagtaccttgatgttattggagggatagaattgaaaattacagtattttgtggtgcacgttttggaaaccaaaaaaattatggtgaaacagctcgattaatcggcaatgaacttgccaaaagaaagattgaactagtctatggtggttctacatctggaacgatgggagctattagtcaagccgtacttgaaaatggaggaaaagtgaccgctatttatcctgaggggctatttgaagatgaacttcctcaaaaaaataccacgtcctttattcaaacgactactatggctcagcgtaaggagctattaattaacagtggcgatgcctttttaattcttcctggaggattaggaactttagaggaactaagccagctattatcaaatatggcgctcggtatcatccctcaaagaaaaattggcattctaaatattaatggtttttatgataacttgattcaactattaaataattttattgatgctaaattcatggatgcattacgtaaggatgatttactgattagtgctgattaccaagtcttgctggaagaattgacagcctcagaaagtaaatcgactaaacaagaacttagtgcataatctaaatttaaataccaaaaaaaggattgccatgatagccaccctaaaagttagaatttagtctaacgcttagcggtcactatcactatagcaatccttttttattatttattattttcttcttccgcttttaatgccgcatcgtaaactggaagctttttaaagtagccttctttattaacttggcgtccgcgggcaatacccatttcaaacttattaacgtcgttcgtaatggttgagccggcagctacataactgtgatcagcgatggtaactggagcaacaatgttagaattacttccaatgaaggcataatctccaactgttgagtgatgtttattcataccatcgtaattaacaaatactactccgcaaccaatgttaatatctgtaccaagatctgcatctccaacgtaactcaaatgccccattttagtccgtgcacctaacttagcgttcttaacttcacaatagttaccaacatgtgcaaattcaccaatctcagcttgagggcgtaaatgactgtgtggaccaatgttactatcatcatgcatgatggcactttcaatttgtgatgaagttaccgttacacgatctccaattgttgaatcaacaatcttcgaatgcgctccaatcactgaactagaaccaatcttagtattaccttgtatttgaacacccggttcaatgatggtatctggaccgatttctactccataatcaatgtaggtattttcggggtcaatgattgtaacaccattaaccatatgttcttcgttaattcggcgttgcataaccttagtagctttagaaagtgctaaacgatcgttaactcccattgattctgagaaatcagccatttcataagcagcaacaatttcgccagcgtctttcatgataccgattacgtctggaagatagtattcaccttgggcattatcgtttttcacttgatgaagtgccgcaaaaagcttttggttatcgaaacaatatacaccggtattaatttccttaatttctgcttcttcagtggtagcatctttctgttctacaattttagaaacaacgccaacctcattacggacaattcgtccatatgagaatggattttcagtacgcgcggttaaaattgtagcagccgctcctttttgacggtgatattcaaaaagattttcaaaagttttagctgtaaataaaggtgtatcaccactaacgatcatggtcattccatctttatcacctaaaattttttcagcttgtaaaacggcatgtcccgtacccaattgttgttcttgaattgcatattctgtacgatcacctaaaagttcacgaaccttttctgccccatgcccaacaatggtaacaatatgatccatattcgttttttcaacttgagttagcatatgatccaccatggcttttccacaaacttgatgcaaaactttatatagttttgatttcattcgagtaccttgacctgcagctaaaatgattatatttttttccattattactagcgctcctcaatatccttaaagtttctttcaaaataatttccggccttaatttggacctgtccatcttgagatgtatcgacatttaacaaggaagtaaagtcttcaatcgcacgttgtcccttgtatgtaccttctgcgaagacggcaatgccggttaattcagcttcaaattctttcagtaaatcaaccatggcatgaaccgtgccgccacccttcatgtaatcatccacgattaaaactttcattcctcgttgtaaactacgtttagacaattccattttttggatacgttctgatgaacgtgaaacgtagttaactgaaatagtcgaaccttcggtaatcacggattcatgacgcacaataataaatggaacatttaaatagttcgcaaccgcttgagctagtggaatccctttagtttccacagtcataactgcatcaacatcagaacgcatatattcgctagctaacattcggccaatggcccgtaaggtactgggatgacctaacaaatcagacatgtaaagatacccaccgggtagtttacgacttggatccgctagttgttcagttaactcatcaacaactttgtgagcctcctctgatccaattcccggaagatatttaataccaccagcagccccattagtaatttcaatggttcctagttgttgtttttctaaagttgatttcataatggataaatcttcgctaatagaagatttagcggatgaatatcttgtaacaaaaaatccagaagttatgagcgttcttggatgattgattaaatagttcgtcatatcaatcaatcgttcacttcgcttcaatttcattggtttcactccactcttcttttgcgtattattcgcaaaaaattacttactttttacttaccaatgaatataatatcatagttcattaataatgttcggatttagaccaaaaatataataaaaagactgaatcgtttaggattcagtctttttaattaatcatctttttttataatcatcgaaccaaaatagattacacattcaattagcgcaataaagaagctgactggccaattagttacatagcctaaatataaacctaaccagactccaattaaagcggcgctaatcgcaaagagcatcattccacttaccgttttggcaacaatcttagccgcagctgccggcaaggttagcagtacaaaaattagcaatgagcccacaatttgggctgctgtactaacactgagcgctaatacaactaaaaataaaattgaaacaaaattagtatgaattcctttgactgaagctccgatatgatcaaaggaatcatattttaagggccgatataaaaataaaataaatactaatgaaatgatcgttaacaacagtacctgattaacttcatctcgcccaattccgattacactaccaaacaaaatatttgtagcatagctaacatttttattggaaatcgataagaataaaattcctaatcctaaaaataaacttgaaactgccgaaattgcagattctcgtttggaagcttgtacactcattttaccgattaaaatcgaactaacgattgtaaataatagcatgccggataaggcttgccatcccataaaaataccaaaagcagctccagaaaaaccaatctcagataacatgtgtgataaaaatgacatgttacgtcctacaacatacacacccataattccacaaataatggcaatgaaggtccctgcaatgtaggcattttgcataaactcaaaactaaacatctagcaagtcctcctcatttttaatatcagctacttctcccaatgcgtagtgatcttcttttagcatcaaataacgattggagtagcgttgcattaaatcaaaatcatgcgtaacggaaattacggttaaatcatgctgttgattaaagtgttggactaaattaaatagttcatatttacgaactgtatctaaactagctgttgattcatctaaaatcaataaatctggattatccactaaggcttgtgccaaataggctttctgtttttgtccacccgaagctcgcccaattctagtattttgaatatcaactaaatcagtttcttcaagaatttcatcgagttgtgttcgttccattttggatagccacggcatttttccgttttgtaaatttaaggctacgaaatctcgaatagataagggataatctcgttcaatattcctaaattgaggcacatagcctaccttcgtccctttacgaaatttgatgctaccactcgtaggcttaacttgattcagtagtgcgcgaatcaaagtcgtctttccgaccccattttcgccgataatgcttagaaagtcacgacgatctacatcaaaactcaaattattaaataatttttgtcctggaaaatccattgctaatttttgaacctgaacaagcgtttcagtcattaatttttaccctcttgtattttactaatttggtttaactgtgaaagcatccacgtttgataattttttcccttcggcatcgtctctgtgacgtttacgattggagtatcgtttttcttagctagctttagaagctcatcgattactttattaccagtttgttgattatttacaataaattcaatccgtttttgtttcacatctttttgtaatttttccaccattttaggcgatggatctgtttcattttcaattgctaaagcgaaagctcggtcgctaactttatatccgagctcatccagcgtgtaatcatatactggctctgtaactgctacttttttgccagtactttttgctctaatttgatcaatcttttgttggattggttgaagtgattcaacatatttcttagcattttcggtaaattctttttgatgttttggatcctttttccctaatttcttagctaaatggttagctaaggttttcattgttgataatttataccacaaatgtgggttatcaccatcaactttacccgtgagtttccccatatttaaaaccttaagctgctttttttgaggagtaattttttgaacccaagtatctgttcctactccattttcaactacaatatccgcgtcggtcattaatttagccgtcttagttgtcggctcaaaatcatggggatcaactgctggattatcaataatgttggtaacctgcactcgatttccgccaacctttttagccacttctccataaaagttaagtgtactaatcacttctactttgccactggacttacttttaggtccagcacatcccgcaacaaaaatagtgctaaacaataacattgacactaaccaaattattttttttcgcatttctttctcctaaagagtaataattactatttacaataattaattataacaaaaaaattttaatatgggacgtctaattttaagataacgttttcaaaaatggtataatgatagtattaatcacgttttgggggaactagtaatgagtaattttattctcgatcaacaataccaagaagaaatttatcaactatatctatatgcatttaatgcgcaagatagcgctaaccgtcgcgatttctggaatcgtcgtttccaacacgctattccctatggaatctccgttgacggtcaaattgaaactagtattttaagtattccttttgaaacaaatttttttggaaccaattttaaaatgaacggtattagcgatgtgatgagcgctcccgaagcatctggtaaagggggcgcgagccaattgatgaaagctgctttacaggatatgtatgacaaccaggtaactttgtcctacctcgcaccatttgctttcagttactatcgacgctttggctatgaacaagtttttgaccatgttacctacactatggctagcgataaattaccacgtatttcaaaaaataccgaaaacgtccaagttaaacgccttgactttagttcaaatactgatttactaaaatcaatctatcaacagtctccactagctcaacggggaggtttaaaccgagccgattggtggtgggattatctacctaaaaaatttgttaatcgccaactggccgtagcttttgaacatcaacaacctactggttatgtcatctacgaacgtaccgctagcgaatttatcatttacgaagttgctaacaccgatattgaaagtcgccaagcactttggaaattcgtcaccaagcatggaactactgccgaaaactttatctatcaaagccctgtcgctgatatcgattttgatctagtcgacgaaccttatagcgtgacaactaccgtccagccttatatgatggcccgaattgttaatttgcaagacttcttagaaaagtatcctacatcaactccagctaagttcaccctggatgttattgatgatgtcctttctgaaaataatggacattggacttttgaatttgacggaaaagtacgttcggttcaaaaatcaaatgtcccattagatacccataccgcgattacaatccaacaattaactaaaattctttttggatatcgctcagcagcatccttggtaggacatggaaaaatcgccggttggacatcagataacgtaaaaaacttagatgccatcaccgtgtctcagaaacctattttggcagattatttctaattattgctaaaactattacttcaaaaaaacaaacatctatatttaacgatgtttgttttttactacctcggtgccatttagtgttaccataatttgtaaatagttttaaaggaaggattaacgatggactacaacatgccttttttcgaagaaatcatgcaagatcctcaaaatgcaatttatactgctaaaggatggcatccaatttatagtattaatccccaagcaaaaattttaattgtgggacaagcccccggaaaaaaagtccaagatacggaaattatgtggaacgaccaaagtggtgatcgtttacgcgcttggatgggaatttcacgggatactttttataattctggtgatattgcggtaattccaatggatttctattatcctggtaaagctaaaagtggcgacgttccgcctcgtaaagaagttgctgaaaaatggcatcaaaaaatgctggatattatgcctaacatccagcttactctgttaatcggatcctatgcgcaaaaacattatttaaatgttcctcgctctaccactacaactaatctggtgcaaaattatcgtaactttcttcccgaatactttcctttggtgcatccttcacctcgtaacaacatttggctggctaaaaatccttggttcgagcaggaagttgtgcctgaattacaaaaaatcgttcaaaatatccttaaaaaataaaaaactttcgaaacagttcccctgtttcaaaagtttttttattttaatgaaattgcattccaccatctacaataattgtttgtccagttacataatttgaatctggtcatgctaagaatgatactgcagttgccacatcttctggttctgacaaacgtttgcgcggcagtaatgaacgatttaatcggaacttacgctatttttatcctaaggggacttattttgagcacattagtgctcaaggcttgaaaaccaccttactcgaaattaaccagcgaccacttaaaatacttgactggcaaacaccttatcaggtcatgctgaccaatttgtcaaaaaattcggattaaatttgcaatctaccatatatagtgataataaaatttaatttcatgcgatatagagtccctttttccttaactggatcaaggaggcttttttgtgttgatagtgtataattgtatgtattaatagacgtacaaggagctgagacgcgtggaagacgtacaggagacaaaaagacaatttaagacaaagacagatcttgctaaaagtttaggcattgggtctcgtcaaactttgtataatagggccgagagaaatggaatagatttagacaagctaagtttcactgaagaagagttgtctatattgtctggtaaaaagacgtccgttacaactgaacaagccagtggacgcatgatacaagacagacaggaaaaggaagctctgaaagccctaaaacgagaattagagattaaaaataagataattgataatttagaacaagataaagcggatctatccaagaaactagataagagccagcagctacaagaccagcaacaacagttatccttaaaagatcgtgcagagttagataagttgaaaatcgaactcgataagtacaagaagattgaaactgaagaagtagttatacagcctagtgaggcaaaaaagacgcctacaaatactgataaaacagtaaataagacgtcaaatgtacaattagacaaacaagaagacaaacctaaaaagcattggtggaatatcttcaattaatcaattggtatataaaaatgaattttttaagattttacaaatttgaattttaaaaatattgatataacggcactcttaagtagtattttggctataccaattattttgataaaaatagcttaaaaataatcagtcatgtagcgaagttttaataaggatcattatgtcaactagcttttatctgactttggtatagcttagtttgaaacgacaattataactatttagtgcggatttagtcagaattaatggttatttcatatccagtgactttgacaccttttttaatcgtattcaaaacaatagtgacatttaatgtttcaattaattcatctacggccacattcaaaactttttgtttgaatcgtccagctgtccaattgctcgaacggtcaactcctaggaaccaatcttgccaatcgttcatttcaccagtaatcgtaactgttttctgattacccattttctgggcttgatacattttcataaggattagagtgtatttagacttaattcgtgataattctgatagatggaaagagtagtatttctccctcaaatcaaagacatagggtgccacatgctccgaaaacttaaatgtaatcgttttatttttagaaatacgaatgaaattaaataattgggtcattagtacgctatcggaaccatcttcatctttaacaaggaaataaagcggtgtttcttcattcagcgttttaaatcctttgattacacgagtatagttagtgccagaatctgttaaaccaaagtgtttcagcacatctgaagcttgtgccttgaaagtgtcgtccagtttcgaatcacgtgtaacgtaactaaaacagaaatctagtaatttgtgttcaaaagcttttaaattgccgaatgctttggctaagtcgttcccttgagtaaccaaataatcttgtcggcttagtaagtttttagttaattcattggttttaatttcaactttttctttcattgtcttaaccgcctttttaactttaatgcaattataaccataaatgcaaaataatgcaaatacagttaataaatccgcactaaatagttataatgtccgcactaaatagttataatgtccgcactaaatagttataatgtccgcactaaatagttataaagctatgctgtatcccttggtatgactgcatttttattcccttaatgtactataatgtatttaaatgtatttataaatgtataaacttatagggctagcctaggttaaattacaaataataaacactaaaggattaaaaaacgagaaaaaaacttcaagaattagaccacgaaaaaagatataggtttacaggatttgtagaacgaccaggtaaaaagagagaaaacaatcattggaaaccaacattgctattaactaatttaatgattattaaataaaacgtatattttatctacataaatcttgtatatacataatgtgagcaagggacgtgaccctttgcccccgtgttaggttatggttggctagtcgtagtacggaagcaaagtttctacaaaactttggctttcgccatttcagtgttaagactggtttagagctgtcaattccttatgctcccacgctttgctcgtccgctaccattgacagcaaacagttagtttttctgaatcttaacaagaatttagcggctatgttcgtttttaagggccttatttttcgtttttagcggttttgagactatttatataatttataccaaagcaaaaacaaaaagccctcaacaggctcttagagggctaaataacgaagccaggatgattaataatatcttcttgtcttttttgcaaaatataagtgtataaggaatcatacaaattctttttaatctcgtcaggttcattgacagaagcttcaaaaaattcttgaatatcaacttgccaaggatcagcaagcatttcatcaattggttttaatactttctttgactctacaattttaagtaccgatgttaaatccatcagtacttaaaattgtagagtcttactatctagttggcatctttagctaggctatttttattcactcgtgttttctgtctttggaataactaataacatctcgtaagtagttatgtgctttattaatctgagctagaaatggttggtcatggataaagttccgaccattttccaagtgccgtaagtacatctctttatacggtaattcttcattgcgtgcccgattacgttcctcttgcatatcccaagctactctccggtaatcaagatcagcaattcccccatcatcaacagtaagcaataggtatcgagctcggaggttggtctgatgtagattccagccatcataaggttctcccactgaaccagggttaagaattaatcgttcctgactggtataacggtataactgatggtggacatgagcgtagatccccacatcataatgttgcgacggatccatgatctgatccattttctgttgatcgttcgttggaaagaggcattgtcctgaattactttgtgggaggttatgattcaaaattagacgtaatgcgccgacttgaatactagttgtaattggccacttcgccatctcttgaataacatccccgccaacttcatttccgatacattcaccaatccgagaaatcataatttttgtttcatcatcatacgaatgagcgccatcataagcctgaatcaaatcatcatcccagtttccccgaagacaaatcgtcggctttaacgactccaatagttgccaaatgttaatggctccaggaccgggcataaagagatctcccatgaaccagcattcatcaacctgttgcttaacaatgtcatctctgaccgctttaaatgctgtgtagttaccatgaacatctgcaataattgcgattcgtcgttccatatttgctgtcacttcccaccatttatctgacttcagtataattaattttcttccagatgcaatttggtaaaatttactaaattttatgtgcaatcgactgcatagtaagcatacttaaagtataagtataaaacttttaatatattcttttatcaaacttgacagcggtttcactattgtctattctaaagctggctcatttgtgaggagtgagttaagttatttggaagaagggttatctaatgattaattggctattaccaagtgcgccaagtgacaaattagttccaaaagaacaaatgcacggcgcttttattaaatatcggaccagaattttggtcagtacgattttagcctatgcaagttactacattgttaagtcaaactttacactttcgtcaccatatttgacaaaggacgttggcttaactactgctgatattggactggtcctatcagcactcgcaatttcatacggaattggtaaattctttatgggattacttgctgaccggttaaacccccgttactttatcggtgtcggccttattttatctgcaatttttaatactttctttggctacacccgaagcttatgggtaatgatcttgttaatgatcggtatcggtttaacccaaggaattggtgcaccatgttgtcaaaaatcgctagctacatggtttgatgaacaccaacttgggaccgcaacaagtacgtggaatacctcacacaatattggttcaggaactgcttccttaatcgttgccggaacggtcggcgctttcggtgcggccaacattcatagcattttcttaattccatctctgatttctgtcgtaatggctttaatcgtaatggctctgggagttgatacacccgaatcagttggtctccctaaggttaataagagtaagcaaaagaatatcaagcataagacctcatggggtgccttccgtgataatatcatgaagaacccaattgtctgggcactttgcatcatgaacgcattctcgtacattttacgttacggaattgaaaactggatcccaatttacctctcaacttctaagggattctcatcagtcgctaccaattcagcttttaccatttttgagtacgcagctattcctggaactatccttttaggtttactatcagacaagctccttaagggtcgtcgagttccaatcatgttggttacttcaagcattatcctagttttaattccattctatgcacttgcgcaaaatattgtaattatcgacattattttgggtatccttggaatttgtatttacggtcaacaggttctaattggaattgttatcatggatgccctccctgttgaatcaattgcttctgggatcggattatcaggattcttcggatacgcctttggtgaagtaattgcttcatatggaattggttcaatcgttggtaagactagctggaatgccggtttcggaattgtggccgtttcttcaatcgtatgtataatcttctttatcttcttgctaaagaagtatcacaatacactatagaattttaattttgaagctggaaaagtattttattatttcctagcttcttttttattccgtctcttcgtccatcttaatgactcctaacatcaaaataatgctttcagtttagatttacagatcttacaacaccgttattcaaaatttgttaccaagcttataaaaattctctgcacaaagcaattaaaaaattttggcttaaaacagcgtaatctgcaacactttttaaatatttaaaacataacaatcttagttaggtgcaaacataaattgaattaaaaatacagtcaattcaacaacagcagaaattgattttatggttatcagcagatcgagtgaaacgaggtcaatgcgcacttacacatagaatttattctatgttgtgctaggcccattaaaagcctgtatcagaagtcgccgttggcgacaacaaaatcaaaaccaatttacccaaaatcaatttggttcaacatgttttctgtacttgcttgatccaagcccaaataagctaaagtcatggcttcacttgagtgatttagtaagtgcatgactaggccaatattgtaatttgattgcgtgtaaacacgataagccccggttttgcgcatcgtatgagtacctagataattaattcctaacagatcgccaaccctactcataattttgtagaactgtttttcagtgatatggcgatctgggtgttgaatggaaggaaagagccattcagatgctagtttatgatcaagcagccattgacgatacaataagagttctgtttgaactggtttaaggtacaaggtattaggcttaccagtttttcgatcatgaatgaacgcattttgtttaatagaaccgtccagattaaaaatatcggtctgttttaaacccataacgtcactcactcgcagtagcgtagctttaccaacttgaaaaatcgtatagttacgtcggccagctttaaagttattgagtaacgtatcttgaacctctttaagaacgtttgaatcttttatgggtaagacaacttgttgcatgtaaatgacctccagtaagaatatttgcattgtgtatctacacgggatatacttgacttgtaataataatttaggaggggaaaatatggaacttattaaagaacaaacacgcttagcaaagtggggaaactcgaaagctgctagaattcctagccaaattattaaacaactgaaattagatgataaccaagatatgacaataaccattgaaaatggatcaattgttttaacaccaataaaaaagaacccaaccaatattcacgaactatttaaggattggaaagatgacgggaaaagggatcacgagcttgattggggaaagtcagaaggcaatgaacttcaatggtaagccaaggtgatatattttatgttaactttaatccaagccgtggtcatgaacagatgaataaacgaccagccattgctctgagcaatgatctagtctgtcagacaagtaacatgacgattgtggctccaattagcagtaccaagcgtaattttccaatgtatcatcgactaactagtagtcaaacagtatatggaaaagtattattagatcaaaccatagccttagatttacgggcaagacatgtcactgatgaaactattgtcgatcatgtatcgcgtgaagaactagaagaaataatcactttgtacaaattattgtttagtattgatgacaaatagaagaagtcatttctttaatattaaaacaaataacccccaatatctacattatagatattgggggttattctttcaatgttttcgaggggcgatttgtatattatagaccctaaaatgcaacacatagttttctatgctagcttctcaatgtcctatgtgtttttgtatcttatcggcctggcacaagttatatcttttttattttacaatctaccaaaaagcgagtttaagctatgaaaaattatcccagcaatattactcggcaacaatttgaattaattcgaccagctttagaaaattttcgtaagcgaactaagcctcgaaaatatgacctctacgaggtcttctgtgcggtcctatatgtcttgaaaaccggttgccaatggcgtcaagtccccggtgattttccagaatggcggtcagtttacaactattacaaaatttggtcaactaaagctgagcctacggctgattctttattggaacaagttttaaaaaaattgtcattgctcggcgaacttaccaaggacgttcagctttaacttcctttattatcgttgacgctcagagcgtcaaaaacaccgctactgctgaaaacaaaggttacgacgctggtaagaaaatctcagggattaagcgccatctggcagttgatatcaatggctttccgcaggccattcacatgacgcgagcgaacgtctctgatcgagacggggccagtgcaatgatcgctttacatgccatgcatttacgccaggttcaaaatgtcttagttgatggtggttattcaggcgttaattttcagctcgatgtagccagtaatttaaacgcaaccgtgcaggttgcgaagcgcaatgagttgcatcgattcgaagtcatgccccaacgttgggtagtcgaacgatcttttagttggctagagaattgtcggcgactttggaaaaattgtgagcgtcaatttggcagaacaatatctgaaggtttcacttctttaccgaagtaaggcttcaattgggtattgtaatctttcacaaagaaactctgcttggtcaacttattaatttccttattggtccagttgagaagtgatttgttgcccttcttcacagccggagcaatgtaggacttaggcccaatactcttgatgccaaccgtgtagcttgggttatccttggaccaggcgtacaggtatgagttgtcatcggcaagggcaaccccacggccgttcttcaaggcgttaaactgctgcgtcttagaaccaaattttaacagtttaacatcaggctgcttggacgtgaaataattttcggcagtcgttcccttagtcacaatcacattcttacccttcaactggctggccttggcgatcgccttattcttaggtgaaaccacaccaacggaaactttcatgtatggtttggcaaaatcgataacctgtttccgttctggggtgaccgtgaagttggccagaaccagatcaactttgttggagttcaaagcatcaactcggttgttggcattgacttgaacaaacttagctttaactccgaggtctttagcaacctggtgggctaatgttacgtcgtaaccaacgcgcttgccgtctttgttgacccagccgtaaggaggtaggtcaccgaaaaccgcaattctaatggtcccgtttttcttgatctgctgaacggaacttgggttattgctttgcgaacttgacttcttactgttaccgcagcctgttaagaccagtaataaagcggcaaagacacttacaacggcgatgattctggtaaataatctttccttcatgaaatttttcctcctcaatattagaaatccatactatccaaaaatgcttgtgcgcgtttagtttgtggtgcgctgaaaaactgttttgaaggtgtttgttccaaaatatggccatcttccaggaaaatcaccctgtcagcaatctgctgggcaaagttcatctcatgggtcaccacgatcatggtcatgtgatcaacatcagccaagtcttggataatgttgagaattccccggaccatctcgggatccaatgaagcagtcacttcatcaaataacataaaatcaggatgcagggccagggcgcgaacaatcgccacccgctgtttttggccgccggacagttgccggggatatgcgttggcataatcctcgagaccgactcgttccaacaactccagaccttcctttttagcagcgaacttgtcctgtttttgcaccttggtcggcccgagtaggatgttatccatgacggtcaaatttggaaataggtcgtaactctgaaagaccatcccgattttttggcggatctgctgccaatttttttcggtcggattaatctgcttcccctcaaaagtgattgtcccctgccggtattcctccaggccattgaggcagcgaatcaaggtactcttcccagatcctgacggtcctaataacgtgacgacctcgcccttatcgacatgaaaattaatatcgtgtaagacgtgtttcttttgataatacttttctaaatgttcaacctgtaaaatctgctcagccatttgcccgctccaatctcttcttctctaatcgcttggcccaccaggatagtggataatcgattaggaagtagaatagaaatatcaatccgtaaacccagaaaacgccggttggatgagtgtgattattggcttcaatgatttgttggccaatattaatcacatccatcacagaaatcagcatcaaaagagaagtcgtcttgattacccgggtggccaaattgatagtcgccggaatttccaaactaatcgcttggggaatcaatacgtaacgatagagctgataacgattgagcccaattgccttgccggattcgcgttggtgctgtggcaccgagattagggcgccgcgaacaatatcgctcatttcagcagccacccacaaggcaaataccaaggtggccaattgatcgccaggaagattaaaattcaattggcgtggcaagatgtaatagaacaaaaatagcagcacgacggttggcacaattctgaagaattcaagatacagtctcaaaaccactcgcaatggccgattcttaaaggtcctcaaaacgccgagaataattcccaagatgagaccgacaattaaagccactgccgcaattttaactgttacccagaggccgccgagtaaccgctcaaaattagttccttcgaataaaacactaattcccgaatgatccatagcgaaccctcttttctagtaaagtcaaaatgattgatagtggaattaaaatgatcgcatagccaacaaccaagaccaatagatactcgttggaccggtaatacatgccaattaaatccaacgcagtgttagtcaattccggaatggcaatcaccgtaaagatcgaagtctccttgatcaaaaagataacattggcggccattgccggaacgctcagtgagaatccttgtgggaagacaatgtatctggcaagctgccagcgactcaacccgattgccttaccagactccaactggcccttggaaacgccgttgaagccgccggtaaacccttctgccatgtaactgccgccgagaaatatcaatccgataatgccacacaactcggcaccaaacttaatgccgatcactggaaacgcgtaatacaggaaaaatagctgaatcaataacggtgtgtttctcgaaacttcaacgtaaatcgatgccacttgatgtagaaccggtactttgaaatattgaagcaggctcacaattatgccaacaatgatggatccaataatcccgacgaaagaaagccacagggtgagttgaaaccccttctcaaacatcggtaagctctgttggataacggcccagctgctcattgtcaatcatctcctcacaagttattttgcagtcatttgaacacaaaaacgtccctgataaccagcatcagctgatcatcagggacgaattaccgtggttccacccttttttgcgttttgtcaaaaacaaaacgcctcatttcgaatgcatctttaattaaatgccacaactccgagcgcactttcggtcattgtctgcccgctctttcactatcagcggtcgctttgtgcagcccaacaacgtactcttctcttcaacattgtgaaattcaaatgactgtcaatcaattacctaataatgtaatgttaaacatctcaaaagtcaactatttttactaagagtccactctgattcgagacgcttaccatcgttataagcagcggaagtaatgatgtacggtggatcaaagtaaaataaagtatcctcgtcaaattggtccatatcaatatcagcaaatgaacccatggtcatatttcccatcggcatctttgttcgataattcatcaaacgggaaataacatcatcagtcagcccggaattaccaaccggaacgttaaaaccaccattcttattaaatctaatcatgtgttggaaactataaagtgttagtacaaacaactccatcgtatctcgtttcccaaatgcaagtgaattatagtgactccttagtcgaaggtaggcctctttattgcccttcgttaaaccatactcatgcacgatcttttgaatgcgacggattaagtcttctggttcttctaataataaactctggacaagctcgaaaacgacggggttcttctcgttatagaacgttctaccagaaccaactacatttccgccaacgttgaaagcaccaccggtcatgtccacaaaattagagatgtgtgctggtaacgcagcggtaattttgtccatcatcagatccttactacctgcataatttaaaggcgactttactatctcaaagtcttttttaaaataaatcaagacctcttgaagcttctgcccattggccttttgagatgcatttaggtttttatattctcggaagtcaattgtgcgcacctcaacgtcaccatcgacagcgaatttttgaattaagtctattaactcattcaatggaattaacgattgattactatagctgataataacatgggtaaatttcaattgtctaaccaaatcctcaaatgctactttcgcggcgttttttttattgtagtcagacattttccgctcaacacgccgacctgtttttccagtaatttttggcgagtcattgagtgcgattgtttccaaaacatgatatgcagaagcatactgagtcaccgtgtaaggtgtatcgatataggcaatatccccctcaatgtttcgaactagcttattagaatcatcgttatatgtcacgtttcgtttagagaataatggtagtttttccatagacagtggctcaagaatcaaattcttatttgatctaggctcccaatctttaaagaaagcctcgtaggttccagatgtgttcgatactctcataacactttcaagtagcgaagcaagtaagtacacccattctttctctgataacagttcagcatctcttaactcatcaagatggcgacgaattgtgtcaatcttaatggcgttcttttcttgaaaaaattttctatctccttttggagagaaatttaatgtgacgaaaccgtctggctctgttgaataatcataggtattccagtactcaaacggcgtggtattaaagtgatttttgaattttgtgaacttgggtacattcgagaagttaacctttgcttctgaaaacagactggcgtatcgcaaaagatcattagtaataatttcaaaacggtctttaaaatggtcggcaacgcttccagtcccagtaaataagtccgcaaaaacaccacccgttatatttttattctcaattaattggttaatctgttctaacaatcgagttttgttacctagatatctcataatcctctttactctctatttctaaaagatttaattagataataataacataaaataaatccgttttaaaggttgcccgacatgcatcttataaattaatcaccatcttatttttgccggatacacaaatatagccctgatttttagtataataacacgctgctataagttctctctgatatagtaaatttttttctggtgggaatggggaaactgttttagctttatgcatggccatgtttattcattacttaattgcgtcattttatacacacctttcagaaaaagggggcatatttcacaaataacgcctataaaagagcaagcatagaatcattgcttgctctttttgcatttcatcagcataattattttgaaatcaggagggtatttatgaaatttggtggtcgtctaaaaaatgcaagaatagaattgaatcttactcaggaacaagttgctagagatttctttattactagacaaacaatttctagttgggaaaacgaaaaaacttatcctgacattgccaacttaattaagttaagtgactactaccacatttcactagacattttactaaaggaggattctggaatgaaagaatacttggaaaagaaaagcgtggaaaaatctattcgtccaatattcattatattgcttatcatcgatttactttttctcacactacttatactcaaaattgttaatgtaattcagtttagtaatgatgttgttctgattctaaatatatttggcatcttaaatgctatcgctttacttcaattaagctcttttaaaatgaaaatgggtattaaaaataaaaaactaataccaaatagaaacctgagtttaagcataggtggaatattactcatagcaggaatgctatttcttttattaaccaaccatgttttgatcagtgggattttatctggaatgggattcgctattctcgtattttatttattttcgaaattaaattctaaactttcatgaaatattaattcgtactaagctttagggcctataagtctcaaataacccctcaaaaacattgaaagaataacccctaatatctataatgtagatattaggggttatttattttcatattataaaaataacttcttctatttgtcattttttcgataccttttagcacgattttgaccaggaaataaacgatcatgcgatccgactcgaattccaattaagactagttcatctttatcaatcgtataaaccaccaggacatcgttagtttcgcttggtgttttgtttttcggggtatctcgtaagtgaaattcattataaccgctcattcgccgattaagctcatgatcttcaaattctggtggtaattgttgttgctcaagcaacaggtcaatggctgctcgaacttcatcaataatagatttgtctaaactggctaaccgttttagatcagcattaaaggttgcacgtggtttaaatcttagttttttcattatttaaactgaccccaataatcatcatctgattcaacaatttcatcgtcaggtaaaacatggcgtttaattaactgatcacgtgcaattgcatattctaacgaaccttctttagcttttaatgctctttctagccagtccattttttcttgtgaaacgatggctactgcgcgactatttgaacgagcaatataaacggtttcgtcttcgtcattaacttgatctaaatatttttttaggttagcgcgaaaatcgctctgtgttagtgctaatgtcatatttaccaccctttcattgtacttaatattgtactttaatttgtactaaaaatcaattttttaaggagctaaaactatgcaacaagttgtcttacccatcaaagattcaaacgttctcaaagaggttcaagataccttactcaacaactttaaagctggccggcgtaactatacagtttttcaagttggtaaagcgacgctactgcgagtgagtgacgttatgggcttaaaacaggccgatatttttaatccggacggttctattaaacaaaatgcgttcattcacgaccgaaaaactggcaagcctaataccttgtaccttaaaccagttcaaacagagcttttattgtatcgtcaatggctgcttgatcataaactagaatctgaatggctctttccgtccattcaacacccagaacggcatattacggaaaaacagttctacaaaattatgagtaaggttggcgatctattaggaattaattatctaggtactcatacgatgcgcaaaactggggcttatcgcgtttacacgcaatcaaattacaatattggcctagtcatgcacttattaaatcattcaagtgaagccatgactttagcttatttaggcttagaccaagccagtaccgaaactatgttagatcaaattgattttggttagttttatttggatttttagttgttgccgaaggcaacttctgagacagattttaagcacaaacaccagtaattttaattgtggtgtgtaagtgcgcattgacctcatttcattcggttatgatccttgaaaataattgcttgtacatttcaacttttttaagatttaatgccattattttgtgatcttatggctatttaataaaatgactagtcattactgttttgagtcatacgattttcagaatagactagtgatttgattgtggatagatacgttaaactcgtatgtagataaaatattatgggttagtaagccattaatcatgttctgcgaagaaacacctataacgaataaaacgccataaaaagctccttgtaagtcttttatggcgttttattcgttacatacagtattttatatggatgatgcttaattgcgcttagaagcgcttatatggccttaaaacagcggtcacaaattaggtatggtcaatcttttgattttatttttcagcaggaaaaaggcgcagcttattataagttcatcttttatattttatatcttttgttcttttgcgtagttataaatacagtaataacaatgcattcacgtattatatagccacaaaaaactgtgtatatagccacaaaaaactgtgtatatagccacaaaaaactgtgtatatagccacaaaaaaataaaataagtggctatataatgttataataaaagcataaagaaattcccgtctagaagtttttctttatgcttatccaacaacacacccaaaggagtgtatttatatgactattataccggaatcaaagacaaggcaggtacagaccttgaatgaattatcaaaaagaaaagtcgttgaacataatagtttaatcacatccattgccaagatggataagacaccactcaaaatgtttgaactagcggtgtctttaattgataccgacaatccacctcaggatcagacggtttatttatcaaagaaagaaatgtttgctttctttaaagtggatgacaacgataagcatagtcgttttaaagaggcaattgaaaaaatgcaaaaacaggctttttttcagattaaaaaagaacaagataaaggttttaagtttgttagcattgtgccaattccatatgtagaatggacagattatcatgatgaggtattaattcgatttagtcctgaaattatgccctatttaattaatctcaaaacaaattttacacaacatgccttgtcagaaatttccgaattgaatagtaaatatgccgttattttgtatcgttggttatcgatgaattacaaccaatacgagcactatagtgttaaaggtggacgccgagaagaacaaattgacaggtaccgtaatcctgaaattggtatgaaagggttacgagaaatgactgatacgataacagaatacaaacgattcactcactttgaaacgagagtattgaaagaacctctagcagaaatcacaaatcataccagctttaatgttatatatgaaaaagttaaaaaaggacgcagcattgatagtattgtctttcatatcactaaaaagcaggtggcagatgatattagttacaagttagatgatccaacttatattgacggtaagataaggcaagaagaaagtgaaaaagacctcgtatatgaagctatgaaaagtccatatacaaaattgctgatggaacatttcttgttgtcatatattgatttgacggatacgtctattttgtcagggttacagaaaaatgtttatccactttatgacgaattaaaagagttacgtggtttaaagggcgtgaaagagcacttagcatatatccgagataaacaagatgactattcgaaaaagaatattgctaagtatcttaaaaaatcgattgaacagtatctaccaatcgttaaaaggcaggatatagattatgagtgaaaatttaaaaacaattcgagaactcgctgatgagttaggagttagtaagactgcaattaacaaaaaagtttcggatagcgaacgaaaacaatggttttcaaaaaacggaaaccggtttttggttaacgaaaacggacaaaaggctataagaacaatgttttcgtctggaatcgacaaccataaatcgacaaccgaaaacacatatcaacaaccagaatcaaaaaccgaaaactttgaaaacgccaacctaaaacattcagatattaactacttaaatgatattattaagtatcagaatgcacaaatagaagatttaaaagaaactaaatcacaacactttaagcaattgaaccaaatgcaaaatttattagaccaacaacaaagattggccttacaggacaaacaactgctcgaagaatacaaggcagaaattaaggacttgaaagccttaacgatggcaccgcatgatgatggtgaaaaagagatggcggtacaaagcaattctgatcaggaaactagtactatggggtcacaagtcaaaacaaaaaaatggtggcattttgggaaatagatccaataaaaaagaaaatagttgtacttctgtgtcaagaatatggcctgtttttattaagtctctgagtgtgcgaccttcttgtggatttttcacaaggtaacccttgaagtccatgtgagtaacgaatcatactaaaaaagctcctatacataatctatcggactatttttatttagtccgatagattatgtataggagcacactttacaatcttggataatcaaggtgcaactagaaagaacgcaacaattcgattggatcaacaagtagtaactgaatgtgttgactttgatcgttcccaactgaaatatcaatatttccagcagcaatcgtttgcaagctgccaataggccacgggaaaacaaaataattataacctcgttccaaattatctgaaattgcctgatagttgtacgaatattcataaaagaactgttttccaacagaataccaatcagcgggagctgttgcccaggtgtttttttgttgattgtttttgtagtaggtcaaatcatagtacttagtgtcatatatgtctaaatactcatgttcctgttcagatctaagaaccaaagcgtccggtatctgcttatttttagagataattggattactaccaggtaattcaattgaccaaacagcgtttggaattgcttctggtacgtgtaaattcacctgatcaccaatgaacttcttaaaactattttcaaataatacatgaaactctgtcgtaactattgatatttctgattggttcgtgtcaataagattcaaatagttcaggagactaagaatcaacatcttctcgcgcctgacgttcgttttgtttaacgttttgttcagtatccgttttagcttgattacgtcgtataagtcagcatgagttagtcgtgacttaaatgaaaaatcatgaaaaagtacgccaaatttttctgagatctgttccataacagaagcatgtattttggaaactatgtcaaattcggacactcgttttctcttaattaaatttaatagtactaaattatcgtcttgaacaaatggggttgtctttttgatagtccgcccccagttaatatttcctctgtttttgctccactgcgtatgactcacctcgaatataccatttgatcgaaagtctttaatcagccactcgactatgccaaataaatcattagctgaaatatcaatctcagtggtagtatcgcctgacttgtgggcgcgattgttccttagagaatcaataataacatttataatgtctgacggaacgtattgtgtccactccgagtttttaggtagcattacatttaattcattattatttagatgaaacccaacatagttgatcgtttcagcgcgattatcggtatttttcttaaagtattggcgcatataatctggaacttttactccatgtggagctctctgtccatccacccatattctttggctaatatttggcatttttatctcctacgggaagattgccttgtgtactatcccttttaaaagcgtctaaagtaagcacgtcgcttaaatggcgcgtcttcatgaaggttgcttgaacatccgcaaacttatattgaacaaataacccgtcggaataacgtgccgcatccgtccataagtaccccaataatttgtcaacgaaaacctggggatcagttatttcgttctctttgaggaagtactggccaactaaagcgtcctcttcaattttaacttcgtttagcaaatactcattgattgcttccccaacttgcttccaggtaaactgagaatctgccgttgctttattgccgtatgaaacagcatcaaaatcaattgacttgtactcagataaccaacgacgcttgaaggctgtatcaatttgttgcacgccttgatctgctgggttcatcgtagcgatgattgtcatgttaccaggtatcttgatccccgtatccttgaagttggtaaatccaagaacgcgctcgtccagatactcagcaagttccccgttaaaaacttcgtactcacttagtccgtttgaatcgcgatctaacatttgaaacacttcgccaaatacagaggctgcgtttgcacgatttaattcttcgataatcaacaagtggctattttcgggattattaaacgcttctaccagaacacgcgtaaaggcgccggggacatagacgtacttaacacgaccctcgaaatctctttgtggctttaaaccaccaacaaagtctgtgtaatcaaaatcattaaagaatgtaatacgctctttagtcccattgaacattggcgatagttttgaatcgacgtaaaaactttttcctgtaccaggagccccgtaaattagtatgtttttaccggttttgattggagaccgattgaaatcaaactttcgcaatgagattccctttcgaaaattaccgttgaaaaggttatttaaaaagtcggaaattgtgttttcagaagtactaagtaacttaccctcgtcataaatctcaaacgaaattttatcgaaatctaaactgggatgagacagcttatagtacgcaagaatcagtaacaatggaacaaataatgaggatccgatagatttattattattaccctttttgatcaggattagcccttgatcatttttttcaatccgggtgtcggaagtcttgttttttgaagatgtaacgtcattgtaaaattgataggctctttcggctgaggtaaaaggtaaaaacttaaatttactcgggaacatttcaatgatatcaaacccgatagttaccgctgaacggatcgcttcttgcatcgtcttaggatattcatctttatcttgatatacattcaggtcaaaagtgaaatatataagcttttgaggacccgactcataaaggtagtccactgtcccgtcttgtgcaatcttatctaatataaacgaattgaactgctgactaactattgtattacctgccttatcgctataagcgattaacacgtttgaaacaaactccccagcatcattgagaagtaccgtcatgtactctgaaaggctgttatcgatctgcaagtcgcttaatgaagcaacggtaacaaatggttccggaaaataatttgttgcagatagatcgctttgaaatttagtgaagaatgatgccaccgaatcagtatacttattcgtttttgaaattttctcgatattctggaaaaaagttggtttattacttttaaaattggcatcctcgtactttttcaatttgttccataatctttgacttattacagttctcatactatcctgcacctcattgtatatttaatgattagtatatcttaaatgcaaaaaattatcccacatataaagacgtgggataacaggttaataatttttaattaatacttcttggcgcggaaatctacgtccttcacggccaactgtttgcatatcgaagcctttacgttctacccaatctaacaacatttcatttcgctggcctttatgaattacggtatttgaaagcaagaatttacgaccggtattatcaagtcgttcaagataattcaataactcatattcatcacggtattatataaatgatttacgacaaaaagttgggaacacaccgctaatattgaatactgctacaggagcactttttaataatgcgggtgaagttttattgcaggaaagggtagatacgaaagattggggatttccaggaggttaccttgaatatggtgaaacatataaaaaagcaataatgagagagtttcaagaagatacaggtctatcggtaatacctgagaaattaattcaaaacacagatgatactttttataaatatccgaatggtgatcagatacaatctattaaccagttttttttagttagataccttgaaggaacattattgagtgtaaaaacaggtgaaacaaccagactaaaatattttaaattagatcaaccccctcaattttttaacgaacaacatgccgaaatgtttaaaaaaatacaacgaatgagagaataaactgatattccacaaattttgaattataaagcaatatctataagctttagacgtttttacaagaaacggagtgagttaaatgaacgctaataaaaaaagaattagtccatatgtaatattgatttcctgtgcagccgctttggaaggacttctgtttggatatgatacagcagttatttcaggagctgttgggttcttacagataaagtttactttgagtagcgcgcaagttggatgggttacgtcttgtatcttaattggatgcgcactaggtgtttcgattgcaggtattttaagtgatttatttggacgcaagaaaatattggcgctttctgcagttatttttgcactttcttctttaggtgctgctttcgcaggaagttatatgattttagtgatttggagaatgcttgcaggtattggtataggattgacttccttaataacacctttatatattgcagaaatggcaccgtcaaatgtgcgtggaaaattggtatccgttaatcaattagctatcacgattggaatttttattgtctattttgttaatgcagcaattgcgtcaaatgcaacgcaattatggaatgtttcaacaggatggagatggatgatgggggttggagtaataccatcgttattatttttaattgcattgatcccgactggtgaaagtccacgttggttatcacaacacggaaaatctgaggctgcttataaagtattacaaaaagttgaaataagtgatgaggctgcagaaaagagcttagaagaaattcagatgtctgaggaagttgttgatgatacaaaatttagagatttatttaataagacttggttaccagtacttattattggagtattgttagccttgttccagcaattttctggaagtaatgcaataatgtattatgctcctgaaatatttaagggtgcaggatttggacaaagtggtgcattcatggctactgtatcaatcggagtaattaatatggtaatcaccattgtcgcattaggtttagtagacaagataggccgtaaaaagttattaggatggggatcttttgcgatgtcatgttgtttacttgttgtttcaatttgtttctttgtacatgctgctactagcataacattgacttttgttttattagcaattgccgcatacgcagtttctttagctcctgtaacgtggatactaatttcagaaatttttccattaaaaatcagaggtagagcaatgtcaatttgcacggcagttttatggctaagtgattttaccttaagttataccttcccaattctgactcagaatataggagaaggatggacttttatgctttatgtagtagttactgcattgtcggctatatttgtatggaaattagttccagaaacaagaggtaagtctttagaggaaatcgaagtatattggcatgctaaaagtaaaacccatgtaaaataattttaggtttaaatgacaatttcttaaactctcatttgataggcaataaggtctcacataaagaaatgggatgggcgtcggtctattgtcaaacggatatagtacctggactacctcagaaattgaacgtcatattgggttacaatttcattttaaatcagtggcagatgatattcgttaatagttgtaaatgatgaagaatacagtttaatccataatgctttacatgatgattctggtaatgtgcttagcttttcccggtccaaaccaaaatcaaaaagtaacgtttaagttgttagattatatgataagtcatgcagatgctaaataaatgattatcctaagtacaataaaaaaggagaccaaattcgtaagtgaattggtttccttttttatttggaaaattattttttaacatgcttattaacttcttgggcgttaccaaatgaaacagttatgatgcgactgcgcattccccaaatgtagaaaataaatgccacaatgatgataactataaaatcaagaggataatggattaaatttctaccattaaaattatcactaccaatatacgacataactgaaagaaaaattaagtatacaatcagccagaggctactacgtagttgtttcatagtttctttccaatgtaatcgccattcgtaataaataaaaattggtaaacctagtaaaatgactaagataacttcaactgttgttggccacatggcccaataaatagctaaagaagctaaaatgaaagctaaaggtgccataaatttaattgcttttaaacgaacaggtcgattgaaacgggaagccatttttcttaatgatacgaccgtgattggcccagtcaggtaagcaattaacgtcgaagtcgagataacactggctaaagttccccatgatctaaaaatcgaaaccattaccatacttaaaacagcgttgaaagccatagctactcgaggaatcccatatttagcattaattcttcctaaaattttaggaaaatgattattacttgacatagcggccaaggcccgtccagttgaagcagcaaatgaaacaccagttccaaagggtgaaataaaagcatctaaataaagtaaaactgacaaccaatgaatcccaagtaagatagctaaatccgcaaagggtgattcaaagttaattccatgccaaccagattgagtaattagtgcagttggtacggaagtgatgaaagtactttgtagaactaggtagagtacagcactgattgagagtgaaagccctacacctagcccaatgtttttcttagggttttcgacttcatttcccatattaattacggtttgaaaggcgttaaaggaaaaaataatcccagaagcagaagtagcagcgaaaatcgaagctgatccgtaaggcataaattccgatagtgattttccgtaattttcaggatgaaagccacttaaagttaaaaatataatagtaattaaaggtacagcaattttgaaaatggagattaaactcgtaaatcttgttaatagagttactgaccaataatttaataaggtgaagattaaaatgaaacaaaaaactactaatagaccactagtagtgatgttcccatttttgaaaaaactatgggtccaattcgcccatgcccatggccaagaactcatgtattggaccgcagctacagcttcgatggggatgagagtgattagagaaatccaatttgcccaagaggcaataaaaccaaccaatgatccgtgactgtattgagcaaatttactcattccgccagattctggaaacattgtccctaactcaatatagttataggcaattacaccaatcacaacaaatccaattatccaagaaaaaattgccgctggaccagctactgaagcggcctccattgatccaaaaagccaccccgaaccaattagagaaccaagcccaagcattaccagttgaaaaagatttagttttttaataaaaaatatcctccttaatttttgattaataatggtaaatactaacgtatttgtgtaaataaatcaaattggtataggacgttccatatttttatttaaaatttaatcgcttatatggatctaattaaatgggtgatagggtaaggtttaccaaaaccatcgactggatcttctgaatcaattttaaagttattttttagatagaaacgttttgcttgcacattttgcgagtttacatcgattcttttaatatcatatttgcgtactaaagtagacaatatttctctaccgtaaccttggccaataaattgggggtctaaaaataacatgacaagctcgtctttatcgataccactaaaaccaaccacttcatgattttgatttttccagacgattaaatttactgaatccaaagcctgtggaatgatttccttgtaaaaaagtaaatctgattctttcaaaaagtggtgagtttttctaacggatgcttcccaaattttgagaattaaagggtaatcggatttagtagcggtatttgcgtttaaaataataacatctccttttattgttagagctccatttctagtatgtctaaatggtatcatacagatccgtttaaattaaatctaagtaaaaatgattttggatcatattacagtgtttatcgtatatatatttagtacaataatactaagcctatacatgaaacggaggagtttttgatggagcaagaacgaattttaattttaattaaaccagatggtgttagtttagggcatattggggaagtaattacacgtttagaactgaaaggatattcaattgatgcgcttaaagttacccaagcgacggaagcacagttgcagcaacattatgaaaaattagttaataaaccattctttaaggaaatcgaaacatatatgttagaaggcaaaatcgtggcgatgattgccagtggaactcatgttattgatgtttttcatcggatggcaggtgctacagatccgtcggaagctgccttcggaaccattcgtggagacctgggacgggagtggccagacggtttactacgtaatgtggtgcacagttctgatagcattgaaaatgctgaaaaagaaatcaaaatttggtttccagaattaaactaagatgtgtttataaaaaagtaaattacagaaactagttaatcgatgactgattggctagtttttttatataagagctcattatttttcagtagcgagagtaataaataaaattagataattaaacttcctttactaagtctgttcatcagtttatatttattagtcattagaaaagggggtctaattgaacatggttttgagtaagacaattgcaaaaattagaaaagaaaaaaatttaacagttaatgatctcatccgggataatatgtctaaatccagctataatcgttttgctgctggaaaagccgacattcacagccattacttcatcgagctactgaaacgtttacacgtaactttaactgagcttgaatatattgataggggatacgtacctaaagatataaatatttacctatccagaattaaaaattttttaacaagcgtgatgctaatgctttaaaaggaattattaaaattttggaaagtgaatattcaaaaattcataacactgaatatcagcatttaatcggactttgtgagattttgattgctcgtttaaatcactataaactggatatgaaccagaatattttatatcgatacttgattaacacgtcttcttggacgagatatgaaatcattttgttcaataattctctattttatattgaaccagaaactttgagcatcctattgagtaatgcattaaagcatgtccatgaattggatgatcttaacccacaagtagttgaagggtttagacttttaagtaacgccattatctctcttttataccagcaggaaccaactttggcgctatactatatttcaaaactagaagagtttcaagtgaaagaagagcacgtgtatgaaaggattttgttacttttttttaagggtatcagaaaaaaattagaaggttattctgaaatagagtataacaaagaatttaacaaattatattttattttagatgtactacaaatggaggagcaaaaaaggatttttaaaaatgccattgcaaaattataatgttaaaaatcaaaaataatcatttaaaacgaccgtgtagactaatttttaatgcctgcacggtcgttttttagaaaaataaaaagaaaagatgtctgaagtgtttaaagacgttacaacaaatggaaaagtaagaccttggcgagaacgcaaaattgaaaatgtacgctatgcagaatatttgtcgattttagaatttaagcgggcgcatgatattaaaaattgtggggaaactttacgttttaggaaaattggtgaccatttgaagctttatcaaacttggttttgtcacaaacggttatgtccgttgtgcaattggagaaagagcatgaaaaattcaagccaattaaaacaaattatagctgaagcagttgcaagagagcctaaaggacgttttttgtttttaactttaactgttaaaaacgctcattcagcagaggagttaaaagtgtctttaagagctttgactaaagcctttaataagctaactcgctataaaaaagtgactaaaaatttattgggttatttacgttcaacggaaattaccgttaatgaacaagatgggtcgtataaccagcatttgcatgttttattgtttgtaaaatctagttattttacaggggatagcgtgaattatattaagcaagaagaatgggctaaattgtggcaaagagctttaaagtctgattatgagcctgtggtgcatgttcaggcggtcaaggcgaataaacgtaaagggactgactctttacaagctagtgctgaagaaacggctaagtacgaagtgaagtcggctgattatatgacggttgatgatgagcaaaatttggcggtaattaaagacttagaatttgctttggctggtactcggcaaattagttatggtggtctttttaagcaaatcaagcaagatttgaaacttgaagatgttgaaaatggtgatttaattcatgttggtgatgaagattacaccaaagagcaaatggaagctgcggaagaagtcgttgcaaagtgggactttaaaaagcaaaattattttatgtggtaggggggtgttttttatgatgatgagattggataaattttttgttgaagaaatgcaaaaaaatggttttgatgttgattttaagcgattaaaacagatttatcttgattctagaaatagacattctgatgatattgaaaagggaaaagtacgtgctttaaatgagcgtttgaagtatgaagattaggagataaatgagtatgggattatttgaagattattacgatgagcatgacttagataaaaatagtgaatacagccatatgagtaaaaaagagttagtgattgaagctgaatatttgcataattctttgtggaatattttgaaatatgttgataacggcggtacagatatagatgttgttaaagcggaagtctatgacggcatatacgaaagtcggatataaacattgcatgtttagtgatttttggaattttgttccacggtttttgtggatcaaaaatttcggttttgcaaattaaaggaatctcggcggaaaagatagccgagatttttttaattcgggcgtcaatttttcttagaaaaattaagctagtgagtggcgattattttggtggaagagaacagccaaaattgtcggccacgagagcaagattttccgagtaggaaaatgagcggtggggtctgtcctgctggcaaagcaaccctcggtagagaccacactttgcgaagtaaagtatagtgttatactttacatggacggtgtccgaattagggggtgtgtggaatgagttttgttgtcgcaagaatgcagaaattgaaagctgataatttggttggtttgggtaatcacgaccaacggaaaactagcaatcatagcaaccaagatattgacgcttctcgttctcacttgaattatgatttggtggctggacggacgaacaattttaagacggatattcagtcttatattgacgaacgcaaggctggctcccgagctgtccgtaaagacgctgtcttagccaatgagtgggttattacgagcgataaggggttctttgagcaactggacgaaaaacagaccagagcctattttgaaactgctaaacagtactttgctgaaaagtttggggacgagaatatccgctatgcttgggtgcatttagacgagcacacgccccatatgcatatggggatcgtgccgtttgataaagataataaactgtcggctaagcgggtgtttaatcgggaagccctgcaacaggtgcaagatgagctaccagagttcttacagtccaaaggttttaagcttgaacggggtcaaaaaaacaaagagcgtaaaaatttgtctgtgcctgaatacaaggctatgcgtcaagaattagagacggttaaagcagatacaaaaaaacagagacaagaattcgaagattttaaaaaatctgattttgatgtaaccaatgttgaaaccttacaaccacgctttaaaaaaggctacgtgttggttaaaaaagacgattttgagcagatgaaacagggagcaatttatgccaagagtgcttttattgattcactccatgcaaaatctgacgctgaaagagctcatgatagtgaaattaaagctagtagtcgggcgcttgaattggaaatgaagaatgataaactgcaagatgaaaataacaaattgcggacacaattaaatcatgcgcaagatttgattaagcgtatgttcaaggtgctaaaagaaaaattaggcgataaagtgcatatgaaaccagaaacgtggcacaaaatcggcttaaaagctccaaatgagcctgataagcaatctaaaaagcgacccgagagaaatacaggcttgagccgttaaatcgcttagaacgcaaatatgagctaattagagctatatcatgctagcaatagagttctgtttagctgttagtcaacggtaaatcgaattaaaggggcttactgcttttagcagttagcccctttttgaggctttaaggagttgactgactttactcaaccaaaaagccttatgtcctaggaaacaagccattgtttcctcgagcccagcggcggcaagcgacaggggtccagctggctcagctggtcggtgtggctgaaagccacggttttaaaaaagacagtccagcggtttttgctgatctgtctttttggggtttggaagcgacgttttttgtcgctttcttcttatcttgatactagtagcatcaactagtttttagtgttttcgttcctatcccttgatattacagggttttggtgtattattgaggtataaattttaataaagaaagacaaaataaaaaacccacgtgaaatctctgtttggcgaccgagcacgtgagttgattatcatttacgatttatagccttattttaggggggaaaccctattatgtcaaggttgtaagcttagctaaaatgataattcagctccttcacgtggataaaacgggaggagctttttgcatggcaacgtcctaccctcgcagggggcgatcccccaactactctcggcgttaagaagcttgacttctgtgttcgacatgggaacaggtatatccttctcactatcgtcaccacactctgtgctaacttacgttatcacttgagaaaacttttgctctctcaaaactgaacaatatctattttttccttcgagattcaaccacttctacttggttaagtcctcgaccgattagtactagtccgctccatgtatcactacacttccacttctagcctatctacctgatcatctttcaggggtcttacttgcccgaaggcaatgggaaatctaatctcgaggtgagtttcacacttagatgctttcagcgtttatctcatccacacatagctacccagcgatgctcctggcggaacaactggtacaccagcggtgtgtccatcccggtcctctcgtactaaggacagcgcctctcaaatttcctacgcccgcgacggatagggaccgaactgtctcacgacgttctgaacccagctcgcgtaccgctttaatgggcgaacagcccaacccttgggaccgactacagccccaggatgcgatgagccgacatcgaggtgccaaacctccccgtcgatgtgaactcttgggggagataagcctgttatccccagggtagcttttatccgttgagcgatggcccttccatacggtaccaccggatcactaagcccgactttcgtccctgctcgacctgtctgtctcgcagtcaagctcccttctgcctttacactctacgaatgatttccaaccattctgagggaacctttgggcgcctccgttactctttaggaggcgaccgccccagtcaaactgcccaccagacactgtctcccgccacgattagtggcgcgggttagagggttcatacaacgagggtagtatcccaccattgcctcctccgaaactagcgttccggattctacggctcctacctatcctgtacaagctgtacaaacactcaatatcaagttacagtaaagctccatggggtctttccgtcctgtcgcgggtaacccgcatcttcacgggtattataatttcaccgagtctctcgttgagacagtgcccagatcgttacgcctttcgtgcgggtcggaacttacccgacaaggaatttcgctaccttaggaccgttatagttacggccgccgtttactggggcttcagttcagagcttcgcttacgctaactcattcccttaaccttccagcaccgggcaggcgtcagcccctatacgtcatcttacgattttgcagaaacctgtgtttttgataaacagtcgcctgggccttttcactgcggctgatcttgcgatcagcaccccttctcccgaagttacggggtcattttgccgagttccttaacgagagttctctcgctcaccttaggatactctcctcgactacctgtgtcggtttgcggtacgggtagctaaactctaactagaagcttttctcggcagtgtgacgtcaggaacttcgctacttaaatttcgctccccatcacagcttgtccttaagaagtaaagcatttgactctacttcagacttactgcttggacacccttttccagctgggtgctttccttagcctactgcgtccctccattgttcaaacaagtttaactagtacaggaatatcaacctgttatccatcgcctacgcctctcggcctcggcttaggtcccgactaaccctgggaggacgagccttccccaggaaaccttagtcatacggtggataggattctcacctatctttcgctactcataccggcattctcacttctaagcgctccaacagtcctcacggtctgccttcattgcccttagaacgctctcctatcacgccacctaatggtggcatccacagtctcggtaatatgtttaagccccggtacattttcggcgcagaatcactcgactagtgagctattacgcactctttaaatggtggctgcttctgagccaacatcctagttgtctatgcaactccacatccttttccacttaacatatatttagggaccttaactggtggtctgggctgttcccctttcgacgatggatcttatcactcaccgtctgactcccggacataaatcgatggcattcggagtttatctgaattcggtaacccttgatgggcccctagtccaaacagtggctctacctccacgatcctaattccgaggctagccctaaagctatttcggagagaaccagctatctccaagttcgtttggaatttcaccgctacccacacctcatctcagcacttttcaacgtacacgagttcggtcctccagtgcattttactgcaccttcaacctggacatgggtaggtcacttggtttcgggtctacatccgcatacttatatcgccctattcagactcgctttcgcttcggctccgtctcttcaacttaacctggcatacgaacgtaactcgccggttcattctacaaaaggcacgccatcacccattaacgggctctgacttcttgtaggcacatggtttcaggaactatttcactccccttccggggtgcttttcacctttccctcacggtactggttcactatcggtcactaggtagtatttagccttgggagatggtcctcccggattccgacggaatttcacgtgctccgccgtactcaggatcctgaactgagagaacttgatttaacttacggggctatcaccctctctggcgaatcttcccagattcttcagctatcaagttctttggtaactcaaatgttcagtcctacaaccccaggaagcaagcttcctggtttgggctcttcccgtttcgctcgccgctactcagggaatcgaattttctttctgttcctgcgggtactgagatgtttcagttccccacgtttaccttcacacatcctatgtattcagatgcggataatagtcgattaaaactattgggttgccccattcggaaatccccggatcaaagcttacttacagctccccgaggcatatcggtgttagtcccgtccttcatcggctcctagtaccaaggcattcaccatgcgcccttcctaacttaacctatctttacctacggtaaagtgattaattgagtttagcgattaatctttgaactaatcttgttttataactctttaaattacgcggttttctctcggtttaattatgattaacaattaaaattagaaaattatagatattattcagttttcaaagaacaaaaacctctcaaaactaaacaaaactttgacatagtgtgggtttccgtttattccttagaaaggaggtgatccagccgcaggttctcctacggctaccttgttacgacttcaccctaatcatctgtcccaccttagacggctagctcctaaaaggttaccccaccggctttgggtgttacaaactctcatggtgtgacgggcggtgtgtacaaggcccgggaacgtattcaccgcggcatgctgatccgcgattactagcgattccgacttcgtgtaggcgagttgcagcctacagtccgaactgagaatggttttaagagattagcttaacctcgcggtctcgcgactcgttgtaccatccattgtagcacgtgtgtagcccaggtcataaggggcatgatgatttgacgtcgtccccaccttcctccggtttgtcaccggcagtctcactagagtgcccaacttaatgctggcaactagtaataagggttgcgctcgttgcgggacttaacccaacatctcacgacacgagctgacgacaaccatgcaccacctgtcattctgtccccgaagggaacctctaatctcttagactgtcagaagatgtcaagacctggtaaggttcttcgcgtagcttcgaattaaaccacatgctccaccgcttgtgcgggcccccgtcaattcttttgagtttcaaccttgcggtcgtactccccaggcggattacttaatgcgttagctgcagcactgaagggcggaaaccctccaacacttagtaatcatcgtttacggcatggactaccagggtatctaatcctgttcgctacccatgctttcgagcctcagcgtcagttgcagaccagacagccgccttcgccactggtgttcttccatatatctacgcatttcaccgctacacatggagttccactgtcctcttctgcactcaagtctcccagtttccaatgcacttcttcggttgagccgaaggctttcacattagacttaaaagaccgcctgcgctcgctttacgcccaataaatccggataacgcttgccacctacgtattaccgcggctgctggcacgtagttagccgtggctttctggttaaataccgtcactgggtaaacagttactcttacccacgttcttctttaacaacagagctttacgagccgaaacccttcttcactcacgcggcgttgctccatcagacttgcgtccattgtggaagattccctactgctgcctcccgtaggagtctgggccgtgtctcagtcccaatgtggccgattaccctctcaggtcggctacgtatcactgccttggtgagcctttacctcaccaactagctaatacgccgcgggtccatccagaagtgatagcagagccatcttttaaaagaaaaccatgcggttttctctgttatacggtattagcatctgtttccaggtgttatcccctacttctgggcaggttacccacgtgttactcacccgttcgccactcacttcgtgttaaaatctcaatcagtacaagtacgtcataatcaattaacggaagttcgttcgacttgcatgtattaggcacgccgccagcgttcatcctgagccaagatcaaactctcatattaaatgatgagtctttttcaagctcattaattgtttgttttgcgaattgacttcgcataatgttttcttacataatcttgcgatttgtaagaccctacactattgattgtcaaaattttgttcagttttcaaaggtctactatcgttgtcatatcaacggaaaatatgttacatattgcaagcgtttacaagaaaattattttcttgtacaattttgatgttataattaaataaatcacaaactcgagataatcacgatggcaaattttaatttaagacttcaagcttatcaagccaattttagcgataaggaaaaagaattagcacaatttttattaaaaaatcaggcccaaactacccaacttacgatatctgaacttagccatagaactaatatctctactgcgactatttcacgttttgccaagaatctaggttttgataattttcaagctttaaaactctgcatagctcaaaatatagaaactaataatccctatgtagaaatcagccctgccgattctcctaaaaccatggctaaaaagatatttaaattgaatgtggatactttaaatgctactgaaaatgctctaaatggaaaagatttagatcagtgtgtaaatttaattttaaatactaaaaaactaggtttatttggcttaggtgctagcaacattgttgcattaaatggatttcataagtttttacgtaccactatcgaacccatctatgcaagtgattttcatatgcaattaatggaagcagcccgcctctcaaaaaatgatgtgatgctgttagtatctcattcgggggaaaatcgggatgccctcgccctagctgaagttgctaaagaacgtaatattccactaatattaattactagttctgctaactcaactctctcaaaaaaagctgatgttactcttgtttcagtcgctgaagaatcactttaccgcccggatgccttacacacactcattgctcaaattagtataatggataccttatttatgataattgctattaagaccaaacgaaatattgctaccaatattcgacacgaaattgataaaactagaaatagacaataaaaatttcaaaatactgttataatgcttttatcaaacaaactggagtgatcactatgcctcaaaagccattaacagaatacacaattgatattccaaaggttgctgaactattagaagataccgatagtttacatactttttttattaaacttactccgggatatcagcgcgaatgggctcgttttatttttggagttaaatctgaagcgactaaaatccgtcacattgaacagatgaaagccgtttttgaagccggatttaaatcaaaacgagcttatgatcaacgaaataaataatttttaacgcctctaaaagggcgttttttatttggaaaactttcgactaatccacgcaactagcattgatacacttgatatagctataaatacaattccttcgccttgattgttttctactattgctaatacctgtccataaaaaacttctcctaaaggtagtgccaccattgaaatcaacattacaatcgccaatacacttcctaacatattaggctcaaccctaccttgaatttcactaagtatagcaatcgaaactacggtaaatacaaattgaactaatacaaaacttaagataatacagctaattatcaataattgactgtttaaatatagcattgctaaacctgttattaacaataaacccgttgataccatcattaatatgaaaggaggatgagagattcgaactctcgcgtggtttgacccacctgacggttttcaagaccgttcccttcagccagacttgggtaatcctccataataaaaatatacgttttactgccctatactaacaaaagctagatggaccttgtaggactcgaacctacgaccgaacggttatgagccgtttgctctaaccaactgagctaaaggtccaagttcgtatattaaccctatcgcggcggaggggatcgaacccccgacctcccgggtatgaaccggacgctctagccagctgagctacaccgcgatctatatattgaaacaataaatgtatttaaacatttaatcgggaagacaggattcgaacctgcgaccccctggtcccaaaccaggtgctctaccaagctgagctacttcccgttaaaacaatgcacccagtaggagtcgaacctacaaccttctgattcgtagtcagacactctatccagttgcgctatgggtgcataataagtgccgaggaccgggatcgaaccggtacggttatcactaaccgcaggattttaagtcctgtgcgtctgccaattccgccaccccggcatctttgctatagtagtaagggattactactaagcggaagacgggattcgaacccgcgacccccaccatggcaaggtgatgttctaccactgaactacttccgcaaaattgatatgccgactagaggattcgaacctccgaccccctgtttacaagacagatgctctgccaactgagctaagtcggcattatcacttattaatgccatatatttacttttatgaaacatagcactaatttgtgctatgagccgtgacaggctcgaactgtcgaccctctgattaaaagtcagatgctctaccaactgagctaacggctcaaaatataatgggggatacagggctcgaacctgtgacctcctgcttgtaaggcagatgctctcccaactgagctaatcccccatttatatatgaccatttcgaagaaaaagttagtttgtctacgttaaccgaggtattggacgtgtcgaaaagttatcttagccgaatttttagacaaacggttggtactagtgtaaaccagtttattctggatatcaaaatgaagcaagcatgttattacttaaaagatactaatttggcagttcatcaaattgcctctcgattgggctacgatgatccatactatttttcaagaatttttaaaaaggtggtaggtagttctccacgggtttttaggaagcaagaaaaaaataggctgtagccaattatccatgtttatgagtttatattccatgtttctgataccgctttcaatacataatatgaatgtattgagggcgtttttttagaatggaagtgataattttgtattaaatgtattatatttacgtctaattttaagtgatatagcaatgatgtataaaaatcctgcgatgaagatttaatatatggaaaaatttcactgtaccattgagtattttttgttgagagaaggaagagtaaatgtagtaaatatataaaatgtttatgtatagaacaagaaatatcggttctatcaaaagagatacattttagtttcactgattcgataagtacttcttaattaaaaatatgattacgaaaaacgtagttaagtaataatttgtttaaagttaattataattggaatacttataatctggacgaggtggaaatgttttgagtaaataaagttaattaataatcaaatgttgatgacccgtacgggattcgaacccatgttactgccgtgaaagggcagtgtcttaaccacttgaccaacgggtcataaatataaaatatacaagctacggagaaggagggattcgaaccctcgcgccgcttgcgcgacctacacccttagcaggggcgcctcttcagccacttgagtacttctccaaatgggcctaaatggactcgaaccatcgacctcacgcttatcaggcgtgcgctctaaaccagctgagctataggcccatataaaaatataacaaaagcgggtgacgagaatcgaactcgcgacaacagcttggaaggctgtggttttaccactaaactacacccgcataataaaggtattaaattgtgaatggcgcgggacagaatcgaactgccgacacatggagcttcaatccattgctctaccgactgagctaccgagccattttataattggctaaatcaggggagaattggtttctctttgaatgatctacctgaacatggcgtacgccaacggcgtaacgttgaccaacgatccaaatataatcaatctttggggcgatcaattgaacagcgtcccatgatgattaatcaacgtaatcgcatcggcgattttgaactagatacagtcgttggtcctcgtgggcatagtaaggcagttttattaactttaatcgatcgaaaatcacggttcctttgggcataccggttaaaagatcggacgacagcgactgttaatgaagcactaactaagttcctaaccacttttaatggtccggtgcacagctttactgtggaccgtggcactgagtttagtgggctagtatcacttgaatcacaatatggtattaagacctattactgccatgcttatacgccagctgaggctgaaccgatcaccgtcaacaatttcttatgaattatctcgatgtcaaccttatcaggctgaattagcacaaacagatgccgaatacaagcgatcacgatgtggtcggaaaactaagctgagcgatgagttaaagcaaaaaattctcaaccatttacgtctaagctggtcaccaggaatgattgctcacgaatttaaactagctactaaatctattgaataaacaaccttagttgtttaatggagaatagcgggatcgaaccgctgacctcctgcgtgcaaggcaggcgctctcccagctgagctaattccccatgtatgggcctaaatggactcgaaccatcgacctcacgcttatcaggcgtgcgctctaaaccagctgagctataggcccgatacgcgtgctctgagagtagttgttagcgcttttgacaacttaattagtatatcgtgtggagattcaaatgtcaacaactaattttaattaatttgaattaaaatttgaaaacttgatgacgtcatctctcgcgacaacagaaatatactatacactcgtttttaaggttcgtcaacacttttgcattatcgcgggatggagcagtctggtagctcgtcgggctcataacccgaaggtcgtaggttcaaatcctgctcccgcaattatggtcctatggtctagctggttaggacgcctgcctgtcacgcaggagatcacgagttcgagtctcgttaggaccgt
